United States Patent Application Publication US 2006/0134663 A1 - sequence listing, part 7

SEQ ID NO: 22501 - DNA, 160820 bp, Homo Sapiens
aagctttgaaactccacaaatgaaaacactcagcccttctcttcagagagttcactatctctggtggaaaggcagacactgtggaagggtagtacagtgataaatcatgtggggattcctaaacagtaatgacagggagagatttgctcagagtgagagatttgatcctgggattcagagcaggaaataaagaggatcctgaagggagcccatagaattggaagaaaatgaagcagtcaaagagctagagatccctctgaaggatgacgaagtgagggcatcatatggctacccaaaatggtagaggattgtgatccaagagtggataagggcattcaccattgctgagctataatgatcctaggtgagtgctgcccatcactgaggcacacagaagactgactaaagtgaaataaggattgaaagtggtaacattgaggagatccatgacttgtagagcttccctctatcacatgcctcataggtcatctgttctttccttaacattacttccatctcacaaagccatccattccattttagcagcccagtttgtttacttccctatactgcagagaagtcttcttccctttaatttctatctgttgataccatttcttccactattagctatgtagaaaataaaattgaagggatcacgtctcctcatttattcaccaaatatttgcacaccagttatatgccacatattgctattaatagttcctggaactatagaagtatatgaggtgatcatttctaacttatggtattgtctagactggaggaagccagaaagtcaaggagtggagtgagagttaacagagggaagtaggctatcatgggacctgaaaacaggaaagtctaaagcgtgtatgtatacatgataggggaggggagtggacagaaaagggcccccagagagcacgccacctgagctgcatttggagcgcacatgtataggactatacctggagagagtgcaggcaaatggtgcatcaaacgcagcaagtccaggttgagttgtgatgcatttgaggagctgaagtaagtcaacatgaagaagatgaggctgaaaagtaggcagaggttttgttaactattttaggagcttgagccttattttacgatgatttatttggaagcgacttaaggagaacagaaatgatcacagttaggtttttaagagaagaatgaattggagcgtaggaggaaattgtatttataaagactggtaagaaggcttttgaggtaaatcagctgagaaatgatggtagcttgtactgtgcaagggtggagggagctaatggatatatttgaaagctacttagcaggtagactctgtaggacttggtgatttataggattggtgttggggagggtaggagaggaataaatcaagaatggaatctgggtttcgcatttggtcacgtgatagcagaagaaacaaggtcaggggaaagataagtctgctttagacatatttaattcaagatgattactgactttcaagctttcaagctgatatttccctgttctctaaatttaaaaacaagttatttatatatttattgacatcaattgacaattgccttttttgtgctgcttctgcactctgtgtagaccttataatacttctaacgctcctgggttataaactccttgaaaatagaggtaacttcttatatccctggagaatagtgccaggcatatagtgttaagcaaatgtttgaattaatgccactttattttgcttccttgtttatatgtcagtctccttgaagactgattctttaagcgtaaggacctcatggtgatctttgcatttccagtgccttctacagagcctgacccacagttagggttcagtaaacattgtttctattgttatttcatcgtcatcatcatctactatttaagtaccctcatatttttgttaatttttagtcctgggtgttaaatagtaataatctaaggttttgggttttttttagaatgtgatgtgagaatggggctcaatttcaattttagacatttaggtttaactttcataagccaagacttttaatgtaatgcaggctgacttagacattatttactgtgcttcatttcagatatatctacataatgggaatacaagaaagaaatgagaaattgttttatagaatactgcaagatgacattgagagtttaatgccaattgtatatacaccgacggttggtcttgcctgctcccagtatggacacatctttagaagacctaagtaaggcttgtttaaaaaaaagcttgtaaatgattattgaataaggaaaatatcattccataacacccattacatttctattttatgtttgttagccaaatcacatttcccacctcagaaaaacgtaattttgattaaaagagattaacaaaatcccaacatattcataacttttatctttgtaaaaatagcataattcatttctaatcttctttaaattattgtgattgttagaggaattacatacatacttctggaacctgctcccccaccaaaaaaagtcttaattctggtgggagattatccagaattatcattaaaatttttgtcaataaagtcaaattaagagatttttttttctcattttttaatcagttttaatttgtttttgtttttgagacagagtctcactttgtcacccaggctggagtggagtgcagcagtatgatcttggctcactgcaacctctgcctcccaggttcaagttattcttgtgcctcaacctccctagtagctggaattacaggtgcacgccaccatgcctgctaatttttgtatttttagtagagatgggatttcaccatgttggctgggctggtcttgaactcctgactccaagtgatcagcctgcctcagcctcccaaagtgctgggatttacaggcgtgagccactgcatctggcctgttctcctttttttaatgaattttcattccaaatagttgtagcacctacaaacattataagtgggaagagtactgaaatggcaaggactgactcaagttcttgaatgagtcgcgtgatccccatgaatgtgtttcctcatgtgtaaaatgggaatagcaggacctatcaaagagctattggagaaaccaatgtgacagttctttggaaaattatcagcaatattatatacacacacacacacacacacacacacacacacacacacacacatatgctgttttcacttaatctgagttttcttattcctctaatccattattatttttctcaatccttataatattttccccatgcccaattaacacattcttccacgtgtagaaattcagtctcctgtcgccttgtctagtggctttcaaactttaatgtgtgtaagaaatacctgtgggacttactcaaaatgttgatctctgccaactttcctctcctccccatccccaagatttctgatgaaaaagaaaaaaggtctggaggtccggattttagtgagcaccctcagtgattgtgttgcaggtgttccctggaagacactgagaaacagactgttctaacctagatgctgccaacaattactgtaactaaaacatttctgtgacataaccatgctgttcagctattttatagtttcttattagaatgattaaaagatagagagaaacttagaaatactgatgcctgagccccacccccagagattcagattcagttagtctagacttaggagtttcacaaaagagcctggtgtaattctgatgtatacccagagttgagaactgacttgaaacatgaagagcatggcttatgtgtgagggcaaatactgtatattgtttatgcaatgcattgtgctatgggttttttttgttgttcattttgtttttgtagatggtcattaaatcttgattggttggttgattgatctaaactttaagctaattaaatcagaatctttggaggtgggaccctggcattttaaagcttatcagatgattccattatatagccagattgagaaattgctgaactaaactgatttgaactgtaatagtagtgccaaatttaagataccaatgagaaagttaaacctaagatcagtttgacagcaatgaggatccactggccctcatgtctgcctgacctgtgttctagaacctgcgtttcttctttttttcctccttctctcccttccttctttgctttctcttttgaaatctggattgattatctgaattaggtaacaatatactgtgtctaaaatgactttttgttagccattccacaatttatacatacttcaaaacatgttgtacatgataaatacagttgacccttgaacaacacaggtgtgaaggtccatttatactcagattttcctgtgcttctgccacccctgagacaggaagaccaacccctcctcctcctcctcctcctcctcctctttatgattttgttaataacattttcttttttctagattactttattgtaagaatacagtatagaattcatatggcatacaaaatagtgttagtcagccaggcacagtgactcatacctttaatcctaacactttgggaggctgaagcgggtggatcacttgaggtcaggagttcgagaccagcctggccaacatggcgaaaccctatctctactaaaaatacaaaaactagccaggcatggtggcgggcatgtaaaatcccatctactctggaggctgaggcaggagaattgcttgaaccctcggtggaggggcagaggttgcagcgagccgagatcgtaccacttcactgcagcatgggtgaaagagcaaaactccaagtcaaaaaagaaaaaaaattgttagtcaatctgtgtgttactggtaaggcttctggtcagtaataggccattagtagttaagtttttggaaaatcatatgtaaatttttgatttgattttctaacacccacattgttcaagggtcaactgtatatccaatttttgccaattaaaaaataatattaaataagtaaaagtaacttcactttttcctgatgcttcaggtgtctcatcttttgtgtgattttactgtaattttcttctctcccttcctgctccctcaaatttcaaattttcagtttcagtaagtcttaacaatagtttagttggccttgtactgctctcctgcattggtggcttgctttagattttttttttttttcctggtggtgtattgagtttatttgaacatgagatgtggttacatttcttcttgggtaaaatgactgtatcatttaacaataatctttgttgcatctgctatgaacagtaattacagtttgaagtacttgaaaatgtttgaaaataaaccagtgtgacttagctaaatctgcttggaaattataccatgtcttgatattttattaaaatatcaaaatatttcaattatgaacaaaaacttagaaacaaagctgttgtgaaatgcaaaggtgtttttgttctgttgcaggggattatttatttcgatctcagacagaggtcatgttagatcaattgtggataactggccagaaaatcatgttaaggtactaatagcacaaccctccttttcacaatgttttctcttttcttgtaaattacctctaaatctccaagaacagtttttcattgttgctctcatttattttgcacttatatacatgcagatttagtgctttgcagctgaagtgatgataatagtagtagttataaaatgggctactggtataaagtttgactctgagaaagaaattagagctagaatacaaggtgagccctctcggtatcagcaccactggtgtctcctgccttctcaatctccttttctatttcactaatattattctaggtaaagaaaatacattaaaatgccataaaaacttttgtttatgaatggtgttagagaagtttggttatgcctttttttcttttaaatctaagatttagaaccttagcaaatataaaaatgttaaatatagcaaatataagccctggcctatttagttatctttcataaaataaaatgtaataacttatttcaagatctttgggtaggcttttgtaaattttattgtaggcaataatcttacctgcctttatactcctttccaaaataaacattgaatgatcgttggtttgaatactctagcaaaaatttggtcaaataattaaactcacagtatcatcttaagaccttccttataagtaggtattttttttgttctagacctttttctttttcacagttgctaaggttttttttgtttggcctaggttattgtgttggagtaccatgctgtttatttctaaactcttatttttctcttatggtaatctctccatcagaatcttgttcatctctgccatatttaatctttctgaagatatttaagttggtcctctagtcagaagaattctattcctaaaccgaagtcagagggaaatcaaatctagttaatgtctcataatactcagaagtcctagaattttaagtatgctttgttggtttacattggaaattagccaagaaacaattttatttttaagagcaaagagtaaatatatatgaagtgaatcaatcttttaaaaaatgcttttctttagtgccccatttttgacaacttttaatttgcatttttttgtgattaaggctgttgtagtgactgatggagagagaattctgggtcttggagatctgggtgtctatggaatgggaattccagtaggaaaactttgtttgtatacagcttgtgcaggaatacggcctgatagatgcctgccagtgtgtattgatgtgggaactgataatatcgtgagtaacatcattttccccctttatcttcctcctgtattttttaaaatgtgtacaatattccttttttgaaaatgataatttaagaagggaaagttttatgattagatttttttttcttaaactccacttttaatatttatataaataatagtaaattaagtctattaaaagtttcttggtccgggcatggtggctcatacctgtaatcccaggacattggaaggccgaggcaggcagatcaccaaaagtcaggagttcgagaccagcctggccaacatggtgaaacccagactctactaaaaatacaaaaaaaattagctgggcgtggtggcacatgcttgtaatcccagctacaaggctgaggcaagagaattgcttgaatgcaaaagacagaggttgcagtgagccgagatcacaccattgcactctagcctgggtgacaagagtgagactgtctcaaaaaagaaaaaataaagtttcttgtagggcaatacatttaaaaaattgtattagtaattttttattttgcaatttttattgtatgtgtttaaactgattatataaattattttatttttacatttggtttattttgtaggcactcttaaaagacccattttacatgggcttgtaccagaaacgagatcgcacacaacagtatgatgacctgattgatgagtttatgaaagctattactgacaggtattttttaaaagtttgagtatatgaaagcacctttaatggggtgggtggggtaagaaccaaagttttgttttgttttcctttatttctttcctgtgtagataagcaggaggcgattaaatttttgagaactttgttctgcctggctgtttctgcctgattagatgtgccgatatgaggtggtacccatggtctgccttgctttcttgagttacctgacattttgagggaagtctgccctcactgcttccatcaaacgcttactgctcagtacctttttcagccttgaccttcaggctcacgcccaccattccactgaagctcttgtgcagcttttgtattttaagttctctgaccattgggtcctcccacttctctacctctttgcaccgtcaactcaggttttcccacttctatgtccttgaaactctctcttctcttgactgctaaacagcttcctcctaacttggtctttctcccacctttctcttttttttttttttttgtcatcttcacaggttcttgctgtctcttactaaatgtggataactacctagtcctcttctctttcagccatgtcaactatgacctttatgcatgttactactaaacccataaaaacccatctgtagttccactgctcttgtgaggcctgcatttctaatagtcagaatcttccatctggatattctgttatgagtgcatattcatatcccacactgaactcctttcctttccaaacaacctatcttctgtattcccagcttctattattggcagtaacattcatcctgttgccaaaactttgatcttagtgttatctttgactcttctgccttctccgtcagtctcccgtgcagtcagatattcctcaaattcagtgggtactaccacttaaatgtctcctgttttccattgccgcaatcttgctctctccttatctctcttctggagttttctaattcttcctccagtttctctcctctccagttcgtctccaccttaataccagattaattgttttgaaacgtgtgcttcattatgtcattcttttgcttgaaatctctgattggtttcctattgccataggataaagtcaaactcttttaccttaatgatctaaccctggcctacctttaaaattgctggcacgtagaagatatttaaacattaattccttttcagagtcaaagtcaacaagtctaaagctgaactttacatcttcccagaaattgccatctctccttcttcctctcactttcctatcttggacaaccaaatagtaccttcttagttaccccattaccttcacattgtaacagcttcttcctcatttcccagttgatccttatcaatttctattcatcctaatagttcatagttactccttttgcttcctgcatcttctgcttcagatctcttgtcttcgtatcatagtagcctcctagttgcttctgccactcccgtctccccacaccaatatgagctacgtatcactggcaggtttatccttcctaaagggagtcatatgtgaatattttcctttctctgcagccttcactgtttctacatgggatgcagaagaaagtccctcttctctaatttagcattcgagatcctcccttatttggttccaacctgcattaaccaatttctcccttatctcttaatgtaaaccatgaaatatatagccagactgttgaaaattcagggtcaccctaataacagcctgcttttcttcctagctctttactttttgttctttcagggcccacctccttttcaagccttcccttactacttgagctcacctagacgattaacatcttctttttctgaatgtcagtgaactcaaatagcaattatttttcaatttcttatttaatatatactttcttgtgttgctgtttaactattaatgtaatgagaatatacatatcaaatatatattttttgaggttcagagtcaaaggaagtgtcctcctggacacttgaaaatagtttacatagattgatatcccatgggtttatcattgtgccacattctttttaaacacctcatactttttttattgaataatttctacattttggatctagtctttcacaggctctgaaatttttcagatggccttaattgaactaacataatacattatttttgaatgctatcatagggaatattaggtggaaagctgtttaatagtgttattttcaacacaactattgtgggttttgctgtttttagatatggccggaacacactcattcagttcgaagactttggaaatcataatgcattcaggttcttgagaaagtaccgagaaaaatattgtactttcaatgatgatattcaaggtaaagcaaaaaaactttagggttttgattcctactttttaaacatttttaatgtgcccattttttatttgtaaaaatctttgtttttcttacagggacagctgcagtagctctagcaggtcttcttgcagcacaaaaagttattagtaaaccaatctccgaacacaaaatcttattccttggagcaggagaggtaagttttgaaggctttttgaaacttaagcctatcctctcttatagaattagaaaatgggcagaatattgatgtttatgaaagagcatagtgagcctgtaattttgttgaggtagaggatatgaaatcaagagttctgctgtaaaacatgtaatttaaaatatgtttcgagagaatatcacgaagaatttttgtttgatttgtaagggaaaaataaaccaaatatttcttatggcatataatcttcatatataaagtaattcaagcattgcatcgtactctagtatatattaaaatttatgttttgttgaacaggctgctcttggaattgcaaatcttatagttatgtctatggtagaaaatggcctgtcagaacaagaggcacaaaagaaaatctggatgtttgacaagtatggtttattagttaaggtaaggtatttaaaatttggagaagcaaaagagtgtattatatttttagttggatttttaaaatattattccttaaaatcttgtttctcattggagtctccaaattataccaattgggaccttccactctcttttcaacagatgtccctagtcttgttgtcttttacaaagacttctgcttcatattgaattaataatctctatgttggcatcagacttactctttcttgctttgttgtcttgctcttaagagatcaaatggccattgtacaagtatgatcgtgtttgacactcctaaaactaggtttttagtaggaactgagaacttcctaattaaattgcagtattgcagtagttttgatatttgagcagaaattcttttaattttattattatttattttttttgagatgaagtctctctctgtcacccaggctggagtgcagtggtgcgatgtcacctcgctgcaacttctgcctcctgggttcaagcaattctcctgcctgagcctcccgaggctaccgtgcctggccgtgagcagaaattcttaaccctttggagatcataatcccctgaagaaatctaataaaaatctgtggaccctatccccaggaaaaaagcatgtgctcctgaaaccaatttatggataataaagagcttatctcccagattaacttagtacctttgggcctgactacctttgttagcattgattaccattttcactagcttaagaatgtcatatatcttctgtgtaacacattgaatataagtaaactgttccatagttaaaccaatccagtacacaatgctgttatatttttgtatgtacacattaaaatataatggtatagctgtcgcttggcatttatgtctgtggagcaagctatctaaatgtactttgttccagttctaaaatcttttcttgttaattagaaccagtattctattagtacaaaaaataaaatgaaaagttaaagtatgtgaatgaaaaatcttgagtgctcaaactacatgtaatttaaaatgtaatagtagttatataccagacattgttataagactttacatgtattatctcctttaatcatctcaaaaaatcctgtgaagttttacaaatgaagaaacagtttaaaaggtcgagggagttttccaaagtcatcagcttataagtgacggaggtaggattcaaaaccaagtatcctgactgcgaagcctgtgctctgaataattaaactgtgctgcctcccaaagaggctgtaactaccatatttactagtatgtaaggcacaaggataaaacatcacatatttagaaggctattgggggatgtatgttttgactagtacacagttagtttggtacttctttttgtaatgttggttttcatcaaatatgttgtgattctttagcatattggtaggtcaggtctaacacagtattggtagctacaatgtgtttacttagcacaaagtgagaaccctgtccatctccatattcatcatcagattatatatttcttttccagtgtgcaggtagcttggcctatgggcattaggcttccagtgtctcctggtgatcctaaacactgcccttcattttgaaactttgaaaacagtggcttcttatgtcactgtttgctcagcctggttttctcagccgattgatgatagtgtcctgctttactaacccctgcagtttcttatctggagttatcttggagttctgatggaaatacactttttcagaagtcttcttttttaccaaaataagaatatgagttctcagttggtttttgcattcagtatgtttttgtctgccttaaatctttgagaaattcttcattgttctagtctgtcagtggtatctcttctggctttgtggcattactacaaatttaacttttatggtttttgacctgggatttggaaaggaaagcatgtttcttcattcagccatctttaaccagaattccctgttcctcttgtttctgaactcttggtagtgcaagtccatggtgtctgtctgcaattctgaaatcctaaaggctttgaaattccaaaattttttccaaaatttatttttgtgaccaatctgattgccttgaatttacctagaagcgaaacctgactcaaactaataagaagctctttgtaatcttaaccttttgtacttgatgtgactattcataagtttgttcagttgtggagtatctgttgggagggagaatatgtaatatttgatatacgccatattgtatttctaaaatatgaaaaattctcagccaggagtggtggctcatgcatgtggtggctcagcttcccactttgggaagctgaggtggacggatcacttgagcccaggagtttgagaccagcctgggcaagatggcaaaaccccatctctacaaaaaaatcatccgggcatggtggtgtgtgcccatagttccagctactctggaggctgaggtgggaggatcacctgagcctggggaggtagaggctgccactgcactcaagtctgggcgacagagtgataccccatttcaaaataaataaatcaaattaaattaaatatgaaaatttcttaattccaaaactcatctaccccagataaaggactgtaggcttttgtgccacattggacttaggaagacctcatagtgtaaatgcatttttgagaggaactagaaagtttctaggaataatggtagatttgatttttgttttatatttgagtttatggacatgatgaagatagagttggaaggtatgggttgaagaggaaagtaaatgaaaatgaaaagacatttctattgtagaaacaatgtgtaactcataatgatgtctttttatttcatctttaatatgcattgactaaaaaaatactgtattttatctcaaaatttagggacggaaagcaaaaatagatagttatcaggaaccatttactcactcagccccagagagcatacctgatacttttgaagatgcagtgaatatactgaagccttcaactataattggtaggtaaagtttttctgataaataattttactccctaactgtatgttgccagtcatcattaccatgtaggattactaaaaatgaattggcagttttacctagctttcagcatgtacaatgttttctgtgataactttttggttaccatgcatgaaattcagttaccagatgttgctttatacttttaggtcctagacactgtgtagtcgatcatgatttgcttttagagttggtatgactgttggactcaaaacatgaaaaaaaccaaagccatttgcagattttaccaggaaaattctatgcagactcaaagttttcgtggacaacaaagctgaaaactttgagtgtgttttgaatcaggcattgcatagatgccatcagactatgtcatcatggcattacattctcagcagaaaatgtaaaagtgtttaaaagaggagctatttaatttgctgtatagctgtaagtttttttgttttcttgttttttgtttttttttttgagacagagtctcactctgtcactcaagctggagttggctcactgcaacttccacctcccgggttcaagcaattctcttgccccagcctcccaagtagctgggattacaggtacccaccaccacgcccagctaatttttgtaattttagtagagatggggtttcaccatgttgaccaggctggtcttgaactcctgacctcaggtgatccacctgcctcggcgggtgagactccatctcaaaaaataaataaataaaaataaacaaccccccattttccccactccccaccccctaacaaccaccattctactttttgtctctatgaatttaactacctcatataaatggaatgacatggtatttttctctttgtgactggctaattttatttagcataatgtcaagtttcatccatgtggtagcaagttttatcttcccaattagagtgatgaagatagtcatatactctttttaaaaattggttgggcatggtggctcacacctgtaattccagcactctgggaggccaaggcaggcggatcacctgaggtcaggagtttgagactagcctggccaacatggcaaaaccccatctctactaaaaatacaaaaattagccgggcgtggtggcacacacctttaatcccagctacctgggaaggtgaggcacgagaatcacttgaacccaggagggagaggttgcagtgagctgagattgtgccactacactccagtctgggcgacagagcgagactctgtctcaaaaaacaaaaagttaaaagaataaaatttcccataatttactatgtgtatagtagacaataaatatttaagtgagaactttcagcatcttactgttttttcttttcagatttgagattgtgttctcatagattttgcattgctgagatagtgctatctttgtaatgagatattacctgtgtttttattattgtaggcctattgtagaaatgctattgataagcattgcttttatacctataatgaagttgctgtttttcccccttacttattacaggagttgcaggtgctggccgtcttttcactcctgatgtaatcagagccatggcctctatcaatgaaaggcctgtaatatttgcattaagtaatcctacagcacaggcagagtgcacggctgaagaagcatatacacttacagaggtattaataatcacatgaattgatatgtatattattttccctccactagcttattagttatacattcttacaccattgttctaatggtttccctagagattacagcatgcatctatgggtgatcaaagtctgatattaattattgcttataccaattatgggaaacaggtactttataactccactgtaatgccctcacactgtttgcactattgttgtgaattttaattttctatgtattttaaactcaaaatacattattgttatattttacaaaaattattcagatttacctacactttaatttatttatcactattcttcctgcaagtgcttctacctaggatcattttccttctaccagaagaattcctttatttaagtgtaggtctaatgaattctcttggtaatttattttgccttcattttgaaggatattttcactctgcatagacgtaaaagttggtaaatacttgagcattttgaagatatcattttactgttttctgacttttgttttctttttgatgatatagcattgtcttaggtttttaacagtttgactatggcggacatatgcgtggttttctttgtatttattccacatggggattatactgctcctgaatctatggcttgatgtctgtttttggtttttgttttttctgttttgaaaaaatatcagccagtatctctactttggccacattgtctctctcatcttatgggactctaattatatggttagagatatatctcatttatcttttacactgttttctatatttactatctctcttgctttctgtgtttcaatctggtgatttcctttggccctattttccagtttgcagattctctgttcagctgtgctcatctgttgttaggttcttaattttagttgctgtattttttcatttgtagaatttgtgttttatctgtatagtaatttattaatttagtaacagacttaaaatcatgtactgtagaaataatcaatctctaaatactgctttcttgtactcacatttcatgaaactttttactctcttcaaatgcatcttcaccatcagtgtttgtcttttctaaggctgttttttttgagtcatctggcgctgtggagaacaaatttttatttacatccgaactgtttaagattcactacttttagatctttgacactaccacgggattatagcccaattacaaatatctgcctataaatcacttgacatttgggtttttttcctaccattctgtaaggatgtagttgtaatctccacaattactttctatattgttgtggtaagtgatctaagtggctctaggaagtgatttttaaaggcttgtttacaatgatgtctagcagctataattgctagactacatccttgagagtaagtaataaatctgatacatttttttaatcttcactcctttaaaacaacgttttttatagtagaaaagtattacagtgtatctctcaaaagctaaggattcttttaaaaatataaccacagggccgggcacggtggctcacgcctgtaatcccagcactttgggaggctgaggtgggcagatcacgaggtcaggagatcgagaccatcctggctaacatagtgaaaccccgtctctactaaaaatacaaaaaaaattagccagatgtggtggcgggtgcctttagtcccagctgctggggaggctgaggcaggagaatggtgtgaacccacgaggcggagcttgcattgagccgagatcgcaccactgcactccagcctgggtgacagagcaagactccatctcaaaaaaaaccccaaaaaaccatatatatatatatatatatatatatatatatatatatacacaccacagtactgttatacctcataatttgaacaataattatatcttgtcatttaattttttttttttttttttttgagacagggtctctcttggttgcccaggctggagtgtagtggcacagtcatagctcactgcagactccaattcctggctcaagtaatcctcttgcctcagcttcctcagtagctgggactacaggcaaataccaccacacccagctaattttttaatttttatttttgtagagacaaggtcttgctttgttggccaggctggtctcaaattgctgacctcaagtgatcccctgcctcagcctcccaaagtgctgggattacagacatgagccactgtgccccacctaatttcttgaatatgtgaattgcaattaaaattttctgatggtaacaaatatctcactcatttttattatctatcttttgttctgtcttggttatcaggtttgtttgtaaggctaatttgtccttttttttttctttttttttttgagatgaagcgtcactgtgttgcccaggctagagtgcagtggcgtcatctcacctcactgcaaactctgcctcccaggttcacatcattctcctgcctcagcctcccgagtagctgggtgcccgccaccatgcccggctaatttttttgtatttttagtagagatggggttttaccatgttagccaggatggtctcgatttcctgaccttgtgatccgcccgcctcggcctcccaaagtgctgggattacaggcatgagccactgcgcccggactgtttttgtttttcttaattgagtgatggatagtgtagaaaaagaactatagcaataatttaaggctgtggataaagttatttttggagaaagggactttactttttcaagtagatcgccataatccagtcaggatgtggtccacatgaggcctggggtatttccagtttgccctttctcctgatatccacccctttgggtatgaatcatcaaaagtcctgaggtatttatcagcacctctcatccttaacggtccctgaacatccattttcctctctgtcatcatgagactttgggtggctttgctgttcagggtctcagtcacagcttttgatttggaaatcagcagtcatcttgaggggaagagcttcaaatgctaggctcatatatcttgcttccctcttcttttgaatcttggaaacctctcttccccaacaccaaactctcactatcttgttaggtctctgcttgcttacaaaaatttttaaaaatgtattttatctggttttttaaattgtaaccagaggaaaatttggtatgaaacaacccagaaaatcattgccaaagcagaactctcagaacttcctgaacttaatattcatacttttgatatatttggcattcttttttttttttttcccattgttaaacactgtgtaggccaggcacagtggttcatgcctgtaatcccagcactttggaatgccaaggtgggcagaccacttgaggccaggagttcaagatctgcctggccaactaaaaatacaggtgaaaccctgtctctactaaaaatacaaaaaaattagccaggtgtggtggctcacacctgtagtcccagctactcaggaggctgaggctggagaatagtctgaacccaggaggcagaggctgtgtgagccaagatcgtgccactgcactccagcctgggcaacagagcaagactgtctcaaaaaaaaaaaaaaaaaccaacaaaaaaacaacctttatgttgacacatgtattctctcaaaattcctttttgacctttttgaccactccgttagtcaaaataaattctcatgactgttagtttccaattgatataataattattgaaatctcttcttctaaatcaatcacaaaatcaccatacagatatttaaaaattagtctctttagtatactgtcttatctttttattacttttagcttgattgcctgtcctcttcaccaggttttactacttaaaactaatggttattgttccccaaattaaatcttagtcttctacaatgactcttgggtaaatatattaaatgcatcatggatcgttgacatttccaaaatataaaaaatttaagtgtttcgagtagtagtggtatatcaccagaagactgctcatttaagaattttgttttttgtataaatattattgtaataaatgtactttattggaataaataaaaattccccaaggagactagtttgatatactatatttcatcagttttaagatcaaggattgcttgagcccatgagtttgagaccagcctaggcaacgtagcgaaaccctgtctgtataaaaaatttaaaaattagccaagcatggtggcgcacacctgtggtcttagctacttgggaggctgaggtgggaggattgcttgagcccaggaggttgaggctgcagtgagctgtgatcgtgccactgaactccagcctgggcaacagaatgagaccccgtctcaaaaataaataaataaaaagagcatggtgtcatagtttacttttacataaattctttcttagtgttacatgaaataatggcatagaattttgactagtcgtcacctgttaaatttttagtcccattttgttttcaccagggaggtgttactccaacaccgtttgctgctcagcgagaaaaatactctaaaaaaaaatcttcatagttgaattgccagctgcttacatagaccaagttggacttcagaataagaatatactattatcattaaaacctggccacgtttaagccatggattaattattgagttaaatgggcagggaggcagggatggtgacctggagaacgtgaactgctatagaatcttgtcattattgaagagattcccaagatctttctaaatttccaaacttactgataccatgagaacattttttccatgatgtgctatattgtataatctaccttataagactattaaaattaatggtgccagaaaaataattatgtacttattgtgataacatgtatgacattaaccatgaactaaccttaatcatcaaagaaacaaaatttttagtcacaagtaatgtttagaacagatagataattgtaatagctatccatagaataggtagaaaatgatataacaatatagagttgcaagtctaagatagtcagctgtgccctactagcatagttagcttgcttctactcttaaaccttgtatcattttgaaatggaaagtatgtcttgtaaaagtagtggttactctgcattattgaccttcagattacctggagtcaaattcttgaatgttaaatccactaaagccaagggtctacaatgctataaagaataataacacaattaattctcttagaaatactgaatatgccagtaacatttattatatgccattatagagcatagtatcaaaattggatagatgtgacaaatttggagaagtattcttctttaacaaggcatcaggccatttgttttcctggagtgatactgtggtcatgccacatgcctgtgttataaactgcctactgctgggtattatagcatcattgaaaacctgtggctatggagttacaaaaaaatctagattaagatttaactactacagttttgatgtgtgacttttgacaaagtatttgaaaatattaaagccttagttttctgattttttaaaattagtgaaatggagatgatgatgaagttttcatgatggcaaaattaactgagttaaacacatataaagcacttggtaattagttttagcggatatatagtaaatgacagccatttgttttggtatttccccttcattcatcggtgtttatattggtctttataatatggaatggtatttattggccgtctacattttaaatttcttttttttttctttttcttttttttttgagatggagtctcgctctgttgcccaggctggagtgcagtggcgtgctatcggctcactgcaacctctgcctcctgggttcaagtgattctcccgcctcaggctcctgagtagctgagattacaggcatgggccaacacacccagctaattttttgtattttttgtattttttgtagagataggggtttcactctgttccaggccatctcaaactcctggcctccagtgatctgcccaccttggcctcccaaagtgctgggactgcaggtgtaagcttctgtgcctggccttaaatttcttaaaaataagtgtctggtttttaaatttttagtaataaatgatttttaactttattatttatttattgaatgtatactacacatgaaacaaacctcattctaacaaaaggattgtaacgaaaagattgttatatagtatattatgccttgcttccaagtaatatattggtctattttacttcaggacttgattttgtatgaattcacctcaattttctcatccacagaaaataacaaaattgaagttatttcattttattaacagggcaggtgtttgtttgccagtggcagtccatttgggccagtgaaacttacagatgggcgagtctttacaccaggtcaaggaaacaatgtttatatttttccaggtaaatgccaccattatttatgttatagagcaatagttaattatgtaaaaatacttaatggaattctttggaatgggagactgaactgagcaacagtattacagaattttggtataaatgtacaaggaaactcaaggaattcatcaaattcagcatgctccactttctctgaaaatttattcatattgttaattaaatttgtttttattatagaaataatatattgcatgatttgtaaaaatgcagaggaacagaatggcacaaaattatgtaaccctttctatctccccttggtgtacctccttaatcatacttctcagaaccattgtcaataatttgctgggagttcttctgatggttaccatcgtgactgatagatttatttcccaggttcaagcagttcccctgcctcagcctcccgagtatctgggactacaggcatgcaccaccacactcagctaatttttgtatttttagtagagatggggtttcaccatgttgaccaggctggtctcgaactcctgacctcaggtgttctgcccatcccaaagtgctgggattacaggtgtgagccaccacgcccagccaggtgttcttattttgtaagatacacccagtatactggtatcacaccaaaggaaattaataataattgcttaatatcgtttatcattacctcagttcaacaacttatttttattcccaataccttttttattctagaattgctctttctaaatagctacttttaaagcaaaaatggttacagtactcattgagctttttctggagaattattaggattcctttcaatgtttctgcctttgtgctgtattttccataaatttctagtgatcctcagttgtctctttcttttaagcaagactgtgttgagtaaaacaggaattttgtatgattttcttttgcacttgtgtcttttttcttctggtaggtctttccctgactagctgacagcaggctctaattaagatatgacaagtttatataggctggcatcaggcaagcatgtataactgttgtcaaagtaaagagggtatttagtctgtgaatatcctggtacttttctatatttttctccttttttttgcccctcatgttttcctatatgtctcttgagacctaacttctataatagaaactgtcctgtcatccataatctctttctagaacttgataatgttcaaaattaatgtgttctattcagtaacatttctatggcctaaaagacatgagggcaggaaaggaaatacttttctgctgattttaacaaagctatttttttaaactttttttttttagttccaggggtacatatgaaggtttgttatataggtaaattgtgtgttgcagggggtttcatgtgtagattatttcatcacccgggtaataagcatgctacccgataggtagttgtttgatccttaccctcttcccgccctctacccttaagtaggccccagtgtctgttgttcccttctttgtgtccatgagttcttatcacttagctccacttgcaagtgagaacatacggcatttggttttctgttcctgtgttagttcacttaggataatagcctccagctccatgcatgttactgcaaaggacgtgatctcattcatttttttggctgcatagtatttttttttatttatacacatggtgtatatgtgccacatttactttatccagtttaccattgatgggcatttagattaattctatgtctttactattgtgaatagtgctgcagtgaacatacacatgcatgtgtctttatggtagaatgatttatattcctttgagtatatacccaataataggattgctgggtcgaatggttgttctaaattcagcaaaaccatattttatatcatatctgagtattaaggaatttagcagttgattatttttatataacactttaaaatcctaacttaaataacagctatggataccataaatatagacattaaaaatgacctggtcaggcatggtgctctcgcctgtaatcccaacattttgggaggccgaggcaggaggattgcttgaggccagaagtttgacaccagcctgggcaacatagtgagaccttgtttcttccaaaaattaaaaaaattaaccaggtgtagtggtgcacacccctattcccagctagtcaggaggctgagatggaaggatcgcatgagcctgggaggtccaggctgcagtgagccatcatcatgccagtgcactccagcctgggcaacaaagtgagactgtctcaaaaaaataaaataaaatgacctggcatttgaggcagaaatgagcctaaaagcaggaggattggctgaaagtctgtttataaagcaacttaaaaaaaaaactgttaatatttgaatgacctagttgagcaactataacaaccggatgaaaattttttttaagactttaaaagggtcaaagggataagatattgactctaatggaatattggagaattctggaccaaggttagggagggaacaaatgcacagaacaagcttttgaagccagttttacagtggaaatatagaccaggaagaaagtggctaagaggtacagctgtgcttttcatggaaagtggacaagatcggcaccatgtccgagtctggcactacctcccactctggactgaaaccctaaagtgctgtaccttggattgggggtatagtttgcagcagcaatgggtgatttagaaaacctcaagcctctgttcgggactgccagtgcccacaagtgcccagcggaagcaaacaaaaatttctctgaaataagataatggcatcctagtcctcaaattatttttataaattttcaagtacaacctaagtagaaaaataaaaaaaaagataatgaggcacataaagagacataacaacagaagccaaaaccagcaaaaacaagaaaaacagacacactgaaaccctggatataccgtaaatgctatgaaacaaatatgcttattatgtttatagagataaaagccaatcttgaaaacttaagacaagtaccactaaattctagaattgaaaaatgtagtagtctataagaactgagtgagctgggtgtagtggctcatgcctgtaatcccagcactttgcgagaccaaggtggaagaattgcttgagcccaggagtttgagaccagccctggcaacgtagtgagacccccatctctataaaattaaaaaaaaaaaaaaaattagccaggcatagtggcatatgcctgtagtcctagctattcaggaggctgagatgggaagatcactcgagcttgggaggtcaaggctggagtgagtcatgattgggccactgcactccagcctgggtgacagagcaagaccctgtctcaaaaaaaaaaaaaaaaaaaaagagtgaatgtggcttatggcagattagaccagagagaattaatcaactggaaaatatctcagaagaaacaatccagaatgcagcacagagagaccaaaaagaaaaaaaaataggtaagggacatacatttcattgatagatctttaattgaagtcctagaagaaatgagaatgaagcagaggcaacatgtgccggcctcatggctgagttttttttttagaactggtgattgacaatcaatattcaaaaagctcacagaaacccatgtgggatgcataaaaagaaatctacatctaggaacattattgtgaggcttcagaatcaccacaaagagaagaatatgaaagcagtcagaacaaaaagatttccttcaaagaagcgaccgttagactgacagcagactcctcagtgacaataagataccaaggcagtggtaatgacctattaaagttgcttatgggaaatacttgccaacctagaattcattacacagtgaaaatatccttcaagaattaaagcaaaatgaagacatttttcagaaaaacaaaaaaccggggattcaccacctggcagactgtttttatattaaaggaaaggaaattttgttccttagggaaaaagaaaataatcccacatagaaaccctaaggtgtaggaaggaatgaaaagcaaagaaagttatgaataagtgggtgggtacaacaaaatgaatgttgtttatatagagtgaaacaaacatcacatgggattttgaaaaatatatatagagagaattaaaatgcacaacaacaatagctccgttaaatagagttaagctgttatgtgggacttacattgattgacaggaaggtaaattaaaaattataatgtggagctggggacattggctcacacccataatcccagcactttgggatgtcaagatgggaggatcacttgaggccaagagtttgagactagccctggcaacatagggagactctgtctctacacacacaaaaaaaatttaactagccaggtgtggtgacatgtgcctgtagtcccagctactccagacaccgaggacagatgatcacttgagcctaggagtttgaggttacagcaagctttggtcgtgccacagcactgtagcctgggcaatagagcgagaccctgtctcaaaaaaaaatttaatgtagaacgttggtggttaaagatgcatgatataaattttaggataaccattaaaacactacaaagacttcctgtttatggtaaggtaatgttgggatgaaatgaaacaacaaaaatccgaaaagcaagaaaaaagaggaaaaggaacataggcaagacaagatgagatgagagtgatgagactaaatgtttgggggctaaatctgccccaattacttgaaaaaaaaaaaactaaaagtaaaagtaaaaaccacattaaatctaaatggaccacattctctacttaaaaaaatgctattaaccatgtgatcttctcagtcatgaggtaatctggtgactacccttcctcaaagccagttgggatattctttgaatagagtaaaacagtgtttctaggctgggagacaccagacatagttgaggacagaggtgctagaaaataggaagtttaaaagcatgtgcggtgatgctcagaggaggtaaaccccaccctcatgctcatagcttccaatcattttctctagttcttaactcttaaatgtgagaaatgcttgaagattactagtcatctgaagaaagtctctttattaaagattttcataaaagagaccaaagcagacaaacagaaaaagacatcttggggaaaaaaacaaggataatgggaagagaaggaaagttttaaaaattatcaatatcctcagggggacaaaatattatatcctataaagacagatttttattttttaaaaaaatagaaagcaaaacaagctcctaaaaataaagtttgatagcagaaagaagaaaaagatgagttaagtcacctaaaaagagagcaaaggacaggagaaggaaaataaagaaaattagagagccaatccaagaggtacaacatcagaaaatataaatgtcagggaacaagaacagaaaaatggagggaagtgaatcctcaagacttcatgaacatttcccaaaactgaaagactcgtgttttcagataggaagcgcctactcactgaatgctaaacatgatgaattaaaataatgcacatcaaggcacagtgttatgaaattgtagaccgttaggtataaaaataaggatctggctgggcacagtggctcatgcctgtaatcccagcactttgggaggctgaggcaagaggattgcatgagtccagaagtttgaaaccagcctgggcaacatagtaaaaccctgtctctacaaaaaataaaaaaattagccaggtgcgatggtacatgcctgtaatcccagctactcaggaagctgaggtaggaggatcgcttgagtccagggaggttgaggttgcagtgagcttgtgccactgtactccagcctgagtgacagagcgagaccctgttgccaaaaaaatttttttttaaaagggatcctacatgcatccagagattaaacgaaaacaatcacctgaaaaggctctgaactcagattgatgcttctcaccagcactggaagctagatggtattggaataatacctcacagttctgaaggaaaaatatttccaagccagaattctaaacctagacaaactatcaaatataagtagaaagaagtaaacaaacacattttcagaaatgcaagatttcaaaaaatatatatctcccatgcactgttcttcagaaagccttgggagaatgtaccctaccaaaagagggagtaataaactaggaaaagttgaatttgggaaatggaatcaacttagaaagaagcaaagaggcctgtaatgataaaggggttttctaggatgacagctccatagctggaatgggggacaaccagaccagaatggagctttagtagatatattctagagcaggaaattcgagaatatataaagtagctaaaatagaagaaaatgtagacaattgagtgagagttcaagggtgaaataacaatgttaaatactaaaaaatcaaagtaaaggaaaaaggacaattattaacttcaggaaagacaaagttatgcagaaaaggaaaagtaaccatgatataaacattgaatattgattgaaccacaattatgctctaactatattgggaagaagaaagaaagctgaaaatatgaaagagcgctaaatatttactcctacaggaaagagtcagtgatctccaaaacagaaaatgcaagatcagcacaataagagaaggcaaaaaaaaaaagaaaaaaaaaaaagagagagagagagaaaaaaaaatcacaagaaacataagttatttaagagtgagagagagaaacaatcagctaaaaaaaattgtcattgcctctgtagagcaagaagtggagtgttagaggtgggctgggaactggagttaaaacaagcgttgatgaattgtatgtatttgtcattttcataaatgtaaaaactaaactgagaaaagccatttgatatttctgaaattacttagcgaataagaattattaaagatcgtttgattttaactcagatttctgtttcttcttggctgttttctgtttggggggagctgtttgcgatgtggatggattaccatttatttgcctgaatataggaatttacttctttcataatttgaaaagtgaccatactagtaaactttaaaatgtgttctaggtgtggctttagctgttattctctgtaacacccggcatattagtgacagtgttttcctagaagctgcaaaggtaaatgttttaaatgttgtttattttataaaggatgaattataaagatgagtagatctgaaaattaaaggcagagagagaatgggttaaatctgccttattaatgaaaaggaagttactcaaattacttttatgatttgcctatttatgcataaaattaatttttttaatcatgacttaaatttttgtaaactgaatcctctcgttttaataacacttagactatacttgcaatttgtatatctgaatatattgtgacagcatagataactccttgcatgtttttaatggacaagtactggtattatttggagtgctggcctatgggagctccagactttgaagtatttctgaagaactcacattaatacaattaatgtctgttttcaaagtagccattgcaattaagccaagctctacatgtgtaatataaagcagaatataatcaataagtctttaaatctggttatttattgtttagtgatgaacagttttaatttctgcagtggtttaagtgtattccttcaagaaataagaggaattatattacctgttttactctctgtttccccaatgctttttccatttactgggtccttattctgttatttaaacaaacaaaagcaaaatgctgtttttctcttcaggccctgacaagccaattgacagatgaagagctagcccaagggagactttacccaccgcttgctaatattcaggaagtttctattaacattgctattaaagtaagtaataacttaaacttcttcacattaattttaatgacattttcttatacaagaaatacaggtttattaagataaatctgaaacatttagaaggctgcaaagaagaaattttaggcccatattcttactaccagaatataacacacatgattattttgggtttgttgccttctagtcttttttctttgcaaacacatacatgcatacacacatgcatgtagtcacttgtgcctttttgaaaaattgttttaaagaatagagataggggtcttcctgtgttgcccaggctggtctctaaccccttggcctgaagcgatcctcctgccttggactcccacagtgcttggattactggcatgagccacagcacctggcctgtgcccattcttataattggtttcttactgcactttttccccttaatatattgtaagtcttttccatgtaacttaataataattctcatgtatgtgatcattaatgctgcatggcattctctttattattttttcaaaatttgtttcatcatttctctgtttttggacatttaagtttttagcttcttattgttagaaataacactgtaggctgggcgcagtggcttacacctgtaatcccagcattttgggaggccgaagcaggtggaacatctgaggtcaggagttcgagaccagcccagccaacatggtgaaaccccgtctctactaaaaatacaaaaaaagttagccaggcatggtggtgggcacctgtaatcccagctactctggaggctgaggcaggagaatcacttgaacctgggagaaggaggttgcagtgagctgagatcgtgccattgcactccagcctgggccacaagagcaaaactccatctcaaaaaaaaaaaaaaaagaaagaaagaaataacagcgtaatgaacatctgtctttacagataaatctttgtgtgtatttgtgatggtttttttttttttttttttttttttgagacagagtcttgctctgtcgcccaggcttgagtgcagtggcggaatctcagctcacggctcactgcaacctctgcctcccaggtttaaacaactctcctgcctcagcctcccaagtagctgggattacagatgcccaccaccatgcccagctaattttttgtatttttagtagagacggggtttcaccatgttggtcaggctggtctcgaactcctgacctcaggtgatccaccggccctggcctctcaaactgctgggattacaggcgtgagccaccacgcccgggctgtgatggtttttttttttttttgggataaattctaagcttaagaacaaaggtttttaaggtgttttaaggcttctgatgcatattgtcaaatgagctcttcagaaaaagtactgatttacattgcagcaattagatatgagtgtatctttttccacactttttccaatacttagaattatttttttaatcttgcatatttaataggtaaaattgtttctcattattaaggcattattagtgagattgaagaattaatatatatatattaagtgtatatatactgtttgctgtggtgcagatattttcccatttgtcatttgttttaactttatagaattgtttgacatgtctattaaaagtgttttatggaattatttgtttattttgtggattctctcctcaccttttatgaatattaatgccttctgtcactccaaaatcataactgtctacttgcattttctaaaataaaacttttttaatctctctgggatttattttaatgtatgatatgagaaagggaaacattttttcctgagtagttaaccagttgccccagcattatttattgattaatgcgtccgttgtttacagttaattgggaattgaatctgttcctgggatttctattcctgaccatttttgtttactatctgacactgttttaaattttataatgtgtataatgtaacatttagtactttatctttcccatcattatgctttttcagtgttgtcttgactgttctaaattgttttcttctggacaagtttttgtatctgcttttttaattttaaaaaactctgcaactttgtatgaaattgttgcatttataaattggtgaagttgggtctttcagtattgagtattctccaatcactatctctctttacttattaagatcttttttaaaaagtgtttcagtataattttgttttcttcatctgaatatggcatttttacttttttctaaatatttttaaatttctgtttttctaacaaagacttttttttctttccaagtatcttctcattgatcatttctaatatataggaaaaggtaggaataatactaatttgaaaacattcatttttatgaatttacttgatgaccagttttttgaacaatcttattttaatagtttttcatttcatttggaattgttgagtttttaattgtctgcaagtaattttttctttttttaatatgcatagtccgtttttctctaactataaatcagctgaaactgcagaatagtcttaagcaattaggttgataagggtattcttgtatttttttttcaatttagagacagagtctatgttgccaagctgatctcaaactcctaggctcaagtgatccttctaccacagcctcccgagtagctagaggcacatgccaccacacctggctaacatctttgtatgttaatattaaatatgatgctagcttttgattgaaataagtattttctactttttaaaagaagtagtcttctatttctagattactaagatttttcttaaacattaggattgactgtggaatttatcagccacaatttcaacttccatacagttgatcataaaattttatcattttgactattaaatttatttatttatttatttatttattttgaggccgagttttactctgtcacccaggttggagtgcagcgacgtgatctcagctcactgcaacctctgcctcccaggctcaagcgatcttcccacctcagcctcccgagtagctgggaccacaggcatgcaccatcatgtccagctaattgttttttgcatttttggtacagatgggggtttgcattgttgcccagactggtctcaaactcctgagctcaggagatctgcccaccttggcctcccaaagtgctgggattatagatgtgagccactgtggccagctttgactattaattttattattacattattttggtgcctgtaacctaagcaaagattgggaattggtaaaggatggtatgttcagggaataatagttgagcctgggggaacaggtagggaaatggcatggaagaaaatttgaaagttatattaaagccagctgtacaaatatacaaatgccaggctaaggagtatgattaccttctactgcaaaacagttgaagattttagagcccagaactaggatgatagagtccaactttagaatttatagaatgatattacaggtgggagagattttggaagatattagtcagttaagagattactgggccaggcagagtggctcactcctgtaatcacagcactttcaaaggccaaggcaggaggatgacttgaggctgtaagtttaagaccatccctggacaacaaagcaagatctcatctctaccaaaaaaaaaattagccgggcacagtgatatgtgcctgtagtcccacctactcaggaggctggggtgggaggatcacttaaacacaggaggccaaggctgcagtgagctatgatcataccactgcactccagtgtgggtgacagagcaagaccctgtctctaagaaagaaaaaagagagagaaataattggtatatccaaatgagaggtagtacatgaggtcatagaaggagacctctgcttaggattagtatagcaacagaggcccaggttcatgtctctgcgtttccccagaggcaggagtagagagtgtgctgtgtctgcagtggcataggcttttctttttaggagcaaataaggaagtggtgagtagaggaggcagagctttgtgtctgtccccaccccaaatagccactgattcacccctttggctctatgagcagggctgtgtgtgctcctctgacagccaccagtcaccttctgcatgcctccaggaccaaggggagctttctccaatctcatgccttgcccgtaatctttttctgtggttactaccagcctgtgggaaagagatttgcagtgagtgtgagccccccttatgtctaaagcttgcagttgttccagaataaaacactagctcacattgacctttggcagttccttaaaattttagctgacttcttattgtatgcatggtggccactgcctcattctccctcccatgctctgccacaagtgagagtttctgtgtctagtctgccgccttctctccttcattcatttatttataaatttatatttatttatttatgttaattatgctgctcactggcttcagaacacctcccactgcccctcacatcaggcaggccacgtgttcagctctccaaggtcggaaggaatgaggaaaaatgtgtttattccatcctcctggaagcaaaaatctctgcctgtctttttatatcattcctgtttttcctgttaagtacaaaaactgagaagagcaatttggtcaacaaactgtactaatgacatgttatgtttatttggcccttaggttttttgtttgtttgtttgtttttgagatggagtctcaactctgtcgcccaggctggagtgaagtggtgcaatctcagttcaacacaacctctgcctcccaagttcaagtgattctcctgcctcagcctcctgagtagctgggattacaggtgcccgccaccacgcctgactaatttttgtatttttagtagagacagggtttcaccacgttggccagcctggtctcataaactcctgacgtcaggtgatccacctgcctcagcctcccaaagtgctgggatcataggtgtgagccaccacgcccagccagcccttaggtttttaacctcagatctttattgcagttacctgccactgaggatctagcccttccctacttctttttcctagtcagtgataataaaatattagtaaaatatgttttctataatagaacagaaaacaattgaacacattttctatcacaaaatacactgagattgagttcttggtaccaaggattattttttaataaccatcttattctgagatttttcttttagaaagttgaaatatgaaactttaataatggttaccatttggaatgagaattagaggaggggagcgacatcttataattgtttgaattttttctaccatatgtcactacatttttttaagttaaaataaaacctgccgggcatggtggctcatgcctgtaatcttagcacttaggtaggctgaggcaggcggatcacctgcggtcaagagttcaggagcagcctagccaacatggcaaaaccccatctctactgaacatacaaaaatttaccaggcatggtgttgcatgcctgtagtcccagctactggggaggctgaggcaggagaatcgcttgaacccaggagatggaggttgcagtgagctgagatcgtgccactgcactccagcctgggtgacagagcaaggcttcatctcaaataaataaataaataaatccataacagagcaaggctccatcttaaataaataaataaataaataaataaataaataaataaaaccatgacttcagaactttactgtgtgagaggtgctgtgctaccctgtgaggaagtgtttcacattcctcattttatatcagaactgaggttcaagggcttattctcaccaccaatcatggtgtgtggcttgggtggagaatttgaaattcactcaagccacctttggtggggagtagtcgagcttactgttgagggtctaatatctagactcagaatgctttgggtttgaaacagctctcaagtaactaccttgggcaagttacttaaactcctctcattcctcatatgcagaatgagaataatgatagcacttatctcctggggttcttgtcgagagtaaaggaggtatccttgtaaaacacatagaaagtgcctggcactcagtgatagtggtgtcagttcccctgtataggttctagccctgacttcacctgaccttatagttctagtgtctaaatcctgatttataataattactatgcctcttaatccaaattctagagcagaaacctctctctcaccttgggttaggttttcttcctggtcaagttggctgtgattaggaaatagtctctgtgcccctctagaaaggccactctttcagcaagactgggaggaatgacataggctgggcaggttatctaaatgtatttactagaatgacacagtagaacttaaatgtgtttggttttatcttttaaactttccatagtttccaaatgttttgaaaggagtcaaagcaatgttattttttactgtgaaaaaagaagaatgccattcttctaaacttattttcctgtgttataatagtacgttgtctctctaataggttaatactcagagcctacacaataaccttacttatttttcaggttacagaatacctatatgctaataaaatggctttccgatacccagaacctgaagacaaggccaaatatgttaaagaaagaacatggcggagtgaatatgattccctgctgccagatgtgtatgaatggccagaatctgcatcaagccctcctgtgataacagaatagaagcactcccctgataaatactttctgtgctccagggaaccccttttttcagacaagaagagataatgtcttcagttttatggtgttttctgtgttttgttctccctgaccactttggttgatgtattttttccatgcgtctccacatctgttggggtagacgtgttgattgattgcattgcccaccagcaccctacaatcagatagttgtgatgctttaattctaacatacagcccgtaccacatccaggagatgtaaaaagtgtgtttgtgaatgtcttcacttgtactctaattcagacttgccaaagtatttgctatttactattatgggtaatactcttctctggcctagttcttacagagctactaaaatagaaatttacttttatggatagaagtacagaattttgagaagaaactaaattttcaccaaattttaaggaaaaattgtcattatctaaaaatgttcttatatatctgcttcatcttaccttcatactctgaaattccctatagcagacagagctagggaaatattaaaaatttaccctatttattttctggaactaaatcaagccttaactataacattatgagagtaatgggaactactgctggctttaagtaaataaaagtcattgttttcaacagtgtataaaaatcatagtgtaacctttttatttaataaatatcttacatttaattgcttcagttatgctatcttattgcccaactagaaatttagatttgcttatgaaaaacacatatttttgttacttctagatgattctaggagggagtataagatacctaatcatatgggaacatcacgtgactttttaaatctaaattagtcatgcttcacatcaaaatgagtcatatttaactggagaaactatgcccttattccagaactgatgctctttattgcttgagataattttggaatgttactatgatactgtttctttgaatatcattagtagtgacaactctttctccattgaaggcagacttaatttttttaaaccaccaacattaatttagagctaaatggggatgaataaggttggtgttcatctgggaaatgccttttttaatcccagtaaaatgggtaataatggctatccagaacagttttcttgtgtggcttgcatattgaagaattctaaaggaaaatatatctgcctaccatgcttgctcttagggaagaaaacttaaatgctcattctaggatagtaacaacaacagataattcatcgataatatgagcatgcacagtatttgatattgctctgtaggaaaaaagagacttcatttttttcatcttctgcctatgaatacaaattgattctttttttttttttttttttttgagacagagtctcactctgttaccaggctggagtgcagtggtgtgatctcagctcactgcaacctctgcctcccaggttcaagcagttctcctgcctcagcctcccaagtagctgggactacaggtacacgccaccacgcccagctaatttttgtatttttagtagagacgggatttcaccatgttggccaggagggtctcgatttcctgacctcgcgatccgcccacctcagccttccaaagtgctgggattacaggcgtgagccaccgcgcccagccaatttttttttttttttttttgagacagagtctcgcttttgtcgcccagtctggagtgtagtggcatgatctctgcaacctctgcctcctcggttcaggcgattcttctgccttagcctcccaagtagctgggattacaggcaccggccaccacacccagctaatttttgtatttttagtagagatggggtttcaccatgttggccaggctggtctcaaaatcctgacttcaggtgatccacccactttggcctcccaaagtgctgggattacaggcgtgagccaccacacctggtccaattcatcataattctgaatataatttaataattttaaaatggtcgcaatggcattgccatttggagtatgggaaaatgcagttggttaattcattgaacagattagtaaagtcagaagtctttttcataacatacggtcacaattcctttcttttaattaaagacaaaaggtttatgggttttggtttgtttgttttagatatggggttttgctatgtcacccttgctggagggcggtggctgttcacaggcgtgggtcatagagcactgcagcctggaactcctgggttcaagctctcctcctgcctcagcctcctgagcagcttggactaaaggtgtgcaccaccgcacctggctgagaggcttctgtttttcatgttccctttatcaaaacaaaatcacgcctaaacatactctctgtgtgaaatcttgattttagttcaacctaagaaatataataaatataaacctgtttcttgcttagtgtttattgaaggcaggaacgtatgctgaattaaagtaattttactacgaagtttgcttattaagtatgcctggtacagtcttcatggaagttattaagtattttaaggaaaaaaataggctaaatggcatatagcctgcttaaataaaataattctatttttttaaaaagctcccaattgtcattgttatttaccagtcaatctttcaacaagtatcaattattggatgtaaattaaagtaaaattgcttaatatttaagctaagaatacaggaaggactatgagcattgaggaaatcgggggaggccagaatggcatcaagctggaaaagaaattaaaacattaccttcgatgagactttacctagcaagaaggtaattattttgaataacagcaatagagaatcttttattttgaattgagaagaaattctgatgattagagtgtcagtaagtagtaggaaaaggtaagaatacatgtgtttctaatctcccaccaccacctgttgtatggaacaaattggattactagcaagggtaaggtttattgacaatgagaagttttagtccaagattttagttaaaatattttaaaattttttgattcataaccaagaagttgcctcagatcactgtgaagctttaaaatgcaggtgcctttgctcctcctccctccaggcccccgggggcagagccctggctggtgtctcttcaggaggacccctgacacaccgattctgccctcacaatcactgccttaaagcaggcagcagaatcttttggagaactaacaagattctgatgctgatgcatagggcctggggtggggcctcagattctgctttttttttcttttttttttttttttttttttttttttagacagggtctctttctttttcctttctcactcaggctgcagtgagtggcgtgatcttggctcactgcaacctccacctcctgggctcaaacgatcctcccgcctcagcctcctgagtagctgggactataggcgcaagtctatgcaaccacccagctaatttttgtatttttagaagagtgggggttttgccacgttgcctgggctggtctcgaactcctgacctcaagtgatccaaccacctcagcctcccaaagtgctggaattacaggcatgagccactgcacccagccaagaatgtccacttctgacaagctcccaggtgatgcctatgctgctggtacagtgaacaacatgctgagaggcattgctccaggatactgcatgtagtgagcagttctttagcgtttatgtgtcatatacttcaagttacatgaaaaagatcaactgaaattatgttcttacacagaatagttttcatctagttttattatgtttttacaggctgtttacaagaacaaaaatagagaatttttgaacatatttttctgaaaacataaaaactagaatactctttaattctaaattatagatttgtagcatacttagtaaacttagtaaccaattttcatttgtaaaagattagctatcaaatggacatttatttctcttagttttcttatgacatgacttgccttatatcctttgtcctttttctgtaacttgtcagcctctggagaaataggattttacatttttgcaaatgagttgccaatgaattaagatcaaaacgtcattattaaggagtatgaagcattatttactggctctcagataacagaaaacccaaaagggatggtggcggagtgaagaaagccttgccttgggaaaaatacttcaaatgctcccatagttttttttcctcaagcccagtcagtatccttcaaggataactttttcataccttttttttggtttgtttgtttctgctagctttatgacagaggttataatattcttttctcctctcttctttgacgtgttacgttgtcttttttttttttttttaacttcttcatactcttaaaaagctccagaatggccaggcgcagtggctcacgcctataatcccagcactttgggaggccaaggcaggcggatcacgaggtcaggagatcaagaccatcctggctgacacggtgaaaccccgtctctactaaaaatacaaaaacttagccaggcgtggtggcgggcgcctgtagtcccaggtactcgggagtctgaggagtgaacccgggaggtggaggttgcagtgagctgagatcgcaccgctgcactccagtctgggcgacagagcgagcctccatctcaaaaaaaaaaaaaaaaaaaaaaaaatctccagggttctgttgaattcaccaaaatggggtcagctctggtgagcctatgtaatactcgagaacattaatataaacccatagctctttactgggcttccatttaaagggaagtcctaagaatgaaatggcaccagcatcctgtttccatccaagacaagaccacacgtgttcaggtgccatgtattcatatagctctcaactgattggtgatttgcactttgtgcatctaattattaaaatgaaactctctacaggtgagctgaagtaacatacttcatatttaaaaagttcacagcaatttgaccatagaaaactttctcatctgaaatcagggtaagtttttttaatgtaagcagagaaaaaaataaagcagtgttttatttcaaatttcagtaagttcaggtgggcctaattaagacatgactattattacaaatcctattcttgccagaagttacttagatagattagtgattagattttaaaaacattattttcctttcttgaataaggaaaattgtgcatctcaaagagaaaagtaaatatggaaatatgttcatagttcagttgcataaaatagacacattaagtcaagtgatttgaatgcttagtgtcttttggtaaacagcattttgtcaacaaacttttcatatggctatagaatcttgttttttccaaataaaaactttgcaattgggagttattcctccattcagcacactttttaatgttaagactaggggaaacttgtgggtatatattcagtggttttcaggattttcttttatgttctagaaaagtaatttttcctttcctagttttaagtatatattcaagcaaatcgttgattcctatacagccattggattatcaccaacacatttggtatatacagtgggccgataatgacaaactaaagtttgtggttaatacctactctataccagacactgttctaaggatccgacatatttaatcctctgtttaccctctgtttctgtgcctgatttacagacagagacagaggcacagagaggttaaatgacttgtcaaaggtcttatgatgtgtggcagagcctgggtttttagctcaaacccctctcagtgaagaaagccttctgtgtaggcaatttcatctaataccttcatgaattgttacttcagatgagaattctcacttattcttttttttttttttttttcttttctttgagacagccttgctctgtctcccaggctggagtgcagtggcgcaatctcagctcactgcaagctccgcctcccgggttatgccattctcctgcctcagccttccgagtagctcggactacaggcgcccgccacctcgcccagctaattttttgtatttttagtagagacggggtttcaccgtgttagccaggatggtctcgatctcctgacctcatgatccacccgcctcggcctcccaaagtgctgggattacaggcgtgagccaccgcgcccggcctcacttagtcttttaccagttcatctgatttttactttgttcccatttataattcaaatataatataaacgtcttattcatttagtcttcagcattttaagtattcgacacgaacattaaagatttggtgttgaatttaataaattacaccaaaaagtctcagtagccaattcactaacatcttttgatttggtaatcttcacagaatcaacaactgttaacacttctgtgcaaataaatttcagttgtgcttatatattataatattcactttaggaatccacctgtcaatttgcaattcaattataaggtatattttaagtgatatctatgtattgtatacacatattccattgaaaggtgagaataattagaaagtagtaatataaaaatgtgtatgaaataagaactttcttaaaagacctagtttagctaaatatatgacaatataaaatgtctgcccaatgtttgattatactttgtctaatgacctttaaatttaactgaaattaaaaccgtacttttgcagttgatatttttgtgttccctttgttaacataccaagcactaattattgacttcaaggaagccacgtattgcaagtcattgcttagcctttcacatctgagtgttgataagatgacggaatgggtagtcttgtagtaattgcttatgggaatgctagtttaagaggaatgccttgtatagaacatattataccagattgacttgttaaaaatggttccaagaatcagtctaaaaacttcagaattatgtgaattattttttctctgttgtgatatgttgtaatgagatgtgtgttcttatattttcttagtaaaattttcttaagcataaaatgctttatgatcttgtttttaaaggctctgtgtataggacacttttaaaacttggtaatataaaccttaacacacactctctctctttctctctctctccagaatacttgatctcttgggaatgtattgttggacttaaattcacctatggagtactagttttgctcctcatcttttcattcccttttgttgagctccctaccctattcctctccttacttgatttaattatgatactaaaggaattctctatcgccttttcttctccccacttctcacacgcaaacaccaagaccctaatgttaagatactaaatcaggagagactatgttgattttgtgatgaaggggggaattatataataacaaatacctactgagaccctcagataaaagttctttttttgcctcaggattcatgaatagctcccaggagtccacgaagcccctgaaataatacatgatcctatgcttgtgtctcttggagagagagagtccatcaccttcatgaaagggccctttcttttcccgggataggttgagaaaaactagcctacgcctctttttttttttgagacaggttctcactctgtcacacaggctggagtgcagtggggcgatctcagctcattgcagcctctgcctcctgagtgcaggtgattctcccacctcagcctcccaaagtgctgggattacaggcgtgagccaccgtgcccggccggcctacaccactttttgacaactccatcatacttctttattgggagggctggcatggtgaaaggccccaacttgcatggaggctgaaataggtagccagaccaataaaggcctatcgttgcctctatagcaaataacacctagatacctcagcaagagcagtgggtcagcagcacctccttccccaaatacaactgctctgttcttgaatcctgaacagtgtggacctcaaataccacctggtctgtgtctaaactgaatagaatacaacttcaaaaacaaatgattttctttctcaagctgatctaaaaattacacttacaacctcgcagatctccaactgctgggaatataagtaactaccatccccaattgctgcgctctgaaattcatcatggctttcacatggaagccatgcctcctgtgggctgctcttagccagtgacttctcacagcagggatggtatgacaggcctattcctggaagacaggagagtcctctgatgcatagctttagctcaagccctgccccgtggccttgccaagctcagaactgtacttcaacctaaggcacttcttcactcaacctctctttctttcctctctctttcacttgggatcagatctgtatgacgctatgaaggctcttgcaggctcttcctggctccctccccaccttcacagacatttcttctcatataaattacttgcatatcagctgggtacggtggctcatgcctgtaatcctagcactttgggaagctgatgtgggaggatttcttgagctcagtagttcgaggccagcctgggcaacacagtgagacctcatctgtacaaaagatacaaaaaattagccagcatggtagtgtgcccttgtagtcccagctactcgggaggccgaggagggtggattgcttgagcccagcaggtcaaggctgcagtgagtcctgactgagatgttccttcttggatgacccagactaacagagcagttgattcaggatgtagttttgcagatgagaaacactaaaactattagagctattggtaaggtaattagactttctagattttctgatatgatctttcttccagatatactgtctcaactccagaccatgttgtgagctaacctaaaccaattcggacacatgctcccaaaacaggtactttcaagtcaataacaataccaaagaggtttgaggtgggtaagggttagctaccccctacaaccttactactaggttttaataaaaacaagtctcagaccaaattctgccatgtatacaaacattcattaagcaaatattcattaataagcaggcacaggccaggcatgatgactcacacctataatcccagcactttgggaggccgaaacaggggaatcacttgagcctaggagttagagatcagtctgggcaacatagtgagaccttgtctctacacaaattaaattagccaggtgtgtttatatacacctgtggacccagctacttgggaggctggattgggaggatcgcttgaggctgggatgtcaaggctgcagtgagtggagactgtgccactgcactctattctgggtggcagagtgagaccccgtctcaaaaaataataagaataataactggccgggtgtggtagctcactcctgtaatcccagcactttgggaagccgaggcaggtggatcacgaggtcaagagatcgagaccatcctggccaacatggtgaaaccccatctctactaaatatacaaaaaattagccgggcgtggtagcgggcgcctgtagtttcagctacttgggaggctgaggcaggaaaatggtatgaacccgagaggcggagcttgcagtgagctgagattgcaccactgcactccagcctgggctacagagtgagactccatctcaaaaaaaagaaaaaaaaaaaaagaagaagaataactaaataatttaaaaaataagcagacacaaaacaattcatacttcttagtctactcaggctgtcataacaaaatatcagaaactgagtggcttaaacaaaaattatttcttcacagttctggaggctggaactccagcactaaggacacaaatcctcaatcgggccctacccttatgacttgatttaaccttaattccttctgtaaagacctcatctccaaatacagtcacattgaggtttagggattcaacatttgaaatgtggggagagattcaatttagtaaaggttcgctcaaggagaagaacaacccagaggcaggatttttatgccctctacttggcatcatgaaatcagaaaaggttctccccaagacagccagggaatccaagctcaggtgccactccaaggcacctataatctcaatagattctttagtttgttaatccaagggtggagaaaatctctgaattatttcagccaatctatctatattgaataccctgcattttaccaatgagagcttctttctaacattcatcatgctaacaaaccaataaaatccattttttgacattcagtatgctaatttgcaaatcattggttttctatcaaaataatagcagaaggtcttgtggtagctacttttgcagtgcagctcttcctgatttaaggcaatcactccagtactcttattggctgaccaccccctaaaattaaagcttaaattagttgacaaatacttaataatacatcagtagactgaaatacttaaaagcaaattacaggtggggcgcggtggctcgcgcctgaaatcccagcactttgggaggccaaagcgggcggatcacttgaggtcaggaattcaagaccaccctggccaacatggtggaacttcatctctacttaaaaatacaaaaattaggcaggtgtgtggcaggtgcttgaaatctcagctactcaggaggctgaggcaggagaattgcttgaacccaggaggcaaaggctgtagtgagccgagattgcaccactgcactccagcctggacaacagagtgagattacgactcaagaaataaataaataggctgggcatggtggctcacgcctgtaatcccagcactttgggaggccaaggcaggtggatcacctgaggtcagaagtttgagaccagcctggtcaacatggtgaaaccctgtctctactaaaaatacaaaagctagctggattgatggcaggctcctgtaatcccagctactcaggaggctgaggctggagaattgcttgaaccagggaggcacaggttgcagtgagccgaaatcatgccattgcactccagcctgggtggcaagagcaaaactccatctcaaaaaaataataaataaaataataaataattaagtaaataaaataaaattgtagctattgtaacagatcatctgtcccaatttcacttagaaaagagtcactacagatttggaaggatagtatttaaaaatgctatcaagaagggtatggaaatagttcatttgagtgaaatccaagtgccactatcacacacacacacacaatgtagaatgaactgaggaagaagcaggcttagatgaagaaagcaaaagttctgtttgggtcagttaagtttgaggtgtgtattagacacgttttgggtgacacttgacattcaactctgttattttggagtgatttctcactatgtgtggtgttgcaggggataaggtgttctgtcctcctctatagaagccaaagctggtgtggggaggatccgtctgctccctacctcatggcaaccaagaacagaggccagtatctactggtgttgtgtccatggcaatgccctaagaaggctctgaggcaagaccttgactgtggttcctgctgcctccattagctcatgttttctgtcagttctgtggattatccagtttcctttcagtctgcttaaattagccaaaattaacttctgttctagtaaccaacaattctaactgacatcgaatgaagaagatcttagctgtttataagggtgtatatattagatcattcaaccagactttatgcaaaatgaggacaggagttgtgttttttattttatatagtctcaaaatctctttctcacccagtccagggctctttctctctttctttctttccttctttccttccttccttccttccttccttccttccttccttccttccttccttccttccttccttccttctttcctccctccctccctccctccctttctttctttctttctttctttctttctttctttctttctttctttctttctttctttctttctttccttctttctttctttcttttgactagtcaagcacaatagtgagaagggggtaaagagtagaacaaggagctgaatctgtaactgactgtgaacaatctattgaggttaatcattacctttggaccagtacagggctctttctctactctataggtttaagcagtgcttgatttcacataatcaaatgatcaacaatttctgactataatttgaaagaaaaatagtgatgaagcctgccatgttagcagtttgttggctctaaaacttgcctactacttttttactaatttgtaatcaaaggcactattttcccgcttcattctatgttaattacctctgtagacaaagttcatttactgattctaggagaccactattatattacatgtagattacctctaagcagagagcaagagagaaaagagaaagcagctttctcttatctgtataaattatagtattagatgtgttaagtatcactttgaaatgacttaaatttgaataacacattacaaagcatttcaacaagcaccatttagtccttatagcaaaagtttaaggcaaaaagagcaattattaacctcattctaccaataaaaaaaaagaggctctgaaaagttaaatgaccacctgatccaggtcactcaaatacaatgggacaaaatcaagatttaaattgtattttgacggaaaagtccatgtggttaagcaatgaaaaaagacaaatgaaaaattgggtaaaagatgtgcaacttatttcatagttaaagagttattggccacgcgcagtggctcacacctttagtcccagcactttgggaggccgaggtggggggattgcttgagctcaggagtttgagacaagcctgggaaacatggcaaaaccctgtctctacaaaaaatgcaaaaattagctgggtgtggtggcacacacctgtggtcccagctacttggggggctgaggtgggaggatcgcttgagtccagggagatcgaggctgcagtgagccatgatcacaccactgcactccagcctgggtgacagagtgagaccctgttacaaaaaaaaaaaaagagttattatccctaatatatagaaagcaccaaaaaaaaaaagagaagataaaggccactaatacaatagaaaactgaccaaaagatatgcacaaaaagttcacagaaaaaaatacaaatggggccaggtgcagtggcttacacatgtaatcctagcactttgggatgctgaggcaggcgcatcacttgaggtcaggagttcaagaccagcctggccaacatggtgaaaccccgtctctactaaaaatacaaaaattagctggcctggtggcgtgcacctgtaatcccagctacttgggaggttgaggcggcagaatcacttgaacctgggaggcggaggttgcagtgagccaagatcatgcaagtgcactccagcctgggtgacagagcaagactccatctcaaaaaaaaaaaaaaaaaaaaaaagcaaatggatcttaaatttatgaaaacatactcaacatagcgcacttatcaaagataaatgccattttaaactacattaagatattagattggcaaaaatccaaaagtttgacaacattattggcgatgaagatctgaggaaaaaggcactctcataaattgcttaacggaagtcaaaatggcacaatgctcatggagggaattttagcaatatatagcaaaattatatgtgtatttaccctttaagccatccatcccacttggtataaatctatgccaaagatacacttgcaaaaataaaaaattacttatgaacaagactatttgttaccatactgtgataacgaaacaaaacaaaaagcagaaagcaaaactggaaacaacccaaaggactgactgaataaaatgatacaaaatcacacagcaagtactagataactgtaaaaaggaatgaggaggaattttgtgtattgatacagggttgtgcttcttagaacttccttcagaaaaaaacttgccattcagctacaaggagtgcacctttactagttcattttggttttcgttcatgggaattttaattatcatctggaggccatttgctttcagcctgaagatattcctttagtatttcttttttctttttctttttcttttctttttttgtttttgagatggagtctcgctctgccatgcaggctggagtgcagtagcacgatcttggctcactgcaacttccgcctcctgggttcaagcgattctcctgcctcagcctcccgagtagcttggactacaggcatgagccaccgcttttttatatatttttagtagagatggggtttcaccatgttagccaggatggtcttgatctcctgatctcgtgatctgcttgccttggcctcccaaagtgctgggattacaggtgtgagccaccgtgcccagcttcttttttgtttttgtttcttccaacagggtttcactttgtcacccaagctggagtacaatggtgtggtcacagctaactgcagcctcaacctcccaggctcaagtgatcctcctgcctcagccttccaagtagctgggactacaggtgtgcaccaccatgcttgtgtagttatttttttatttttattttttgtagagaagaggtctccttatgttgcccaaggtggtctcaaactcctgggtttaagcaatccttccatatcagcttcccaaaatcctgggattagaggcataagccaccacactcagcctggtatttcttataaagcagttctgctagcaacaaattctctcagtttttgtttatctgagaaagtctttattaatcttcatttttgaaagatagctttgctggatataaaattcttggttgacaggttttttttctttgtgcactttaaatatgttatcccactgccttctggctttcattgtttctgctgagaagtcatctcttaatcttgtaagtgatgagtcattttccacttgctatgttcgagatttcctccttgtctttgcctttcagcatttttattatgatgtgcctgtctgtaggtctctttgcatttatcctatttggagtttgttagcttcaggatgtggagattattgtttttcaataaatttggagaaatttcagccataatttcttttcttctgcttctttctccctctcctgatattctcaatacaccaacattcgtgtgcctaaccatgacccacatttttctgaggttttatttatctttcttcattcttttttctctttattctttagattgcataatttctgttgacccagcttcgaatttgctaattatttcttctgttagttaaaataaactgtagggcccctctagtgagtccttctttctttccttccttccttccttccttgaaatgaatagaataacatataaaagaactccaatatgtctggcaggagatttctctgtggaaaacttacagaccaggagagaattgcatgatgtatttaaagtgctgaaggaaaaatgcttttatcctagaatattgtatccaatgaaaatattcaaaaatgaaggagaaataaagatttttccagaaaaacaaaagctgaggaattttgtcaacactgcacctgtcctaaaagaaatgctaaagggaattcttcaatctgaaagaaaaggatgttaacaagcaataacatatcatctgggccaggcatggtggttcacacctgtaatcctaacactttgggaggctgaggtgggaggttgagcccaggagttcgagaccagcctgggcaacatggtgaatccctgtctctacaaaaaatacaaaaattagctgggtgtggtggtgtgcagctgtagtcccagctacttgggaagctgaggcaggagaatcgcttgagcccaggaggcagagcagtgagccgagatagcaccattacactccagcctgggcaatgggagtgaaaccctgtctcaaaaaataaaaaaaaaaaagatatcatctgaaggtaggaaactcactggtaacagtaagtacacagacaaatgcagaatattataacactgaaactgtgttcttaaattcaagacctagaactgttaccgacctcgatccctggtggactgaacaaagagagtgaatgcgggaataaagacaaagacaaataaagacaaagacaaacaagtatgtttggaagaaggggtcgggggcaccttgcttctagtggacaaggacccagactttctacagcccttcgtatttattggtaaaagagatagtgagaagtggggtggcagaaaaggtcaggtgctcggtccacagtgggcttgcaaaactgcattcctcgaacaataggctctagatgtcccagtagataacctcaaggagcccggtgccaggcagtgaccaccctcagcaaaccttctggtggcaggcacagtgtgagtttgcccacatcctgcattcatgataaacagtttgctgtttgatcatatagcctccagtggaatgctgagttggtcatgatacctttggccttttcagctcccaacatagaactagggaaactactaaaagaaaacactgaggacactctccaggacaatgatctggacaaagagttcttgagtaatacccaaaaagtacaggcgaccagagcaaaaatggacaaatgagatcacatcaagttaaaaagtttctggcacagcaaaggaaacaaccaacaaagtgaagaggaacccacagagtgggagaaaatatttgcaaactacccatctgacagaggattaataaccagaatttataaggaactcaacaactctacaggaaaaaatctaatcaattaaaaatgagctaaaagtcttaataggacttctctcaaaagaagacatacagatggtcaagaggtctataaaaaggtggtcaacatcattgatcatcagagaaatgcaaattaaaactacaataagatatcatctaaccccagttcaaattgcttctatcccaaagaaagacaataatgaatgctggcaaggatgtgcagaaagaggaacccttatacactgttggtgggaatgtaaattattaggttgctgcaaaagtaactggtttttgacattgaaagtaatgacggccagacgtggtggctcacgcctgtaatcccagcactttgggaggccgaggcgggtggatcacctgaggtcaggagttcaagaccagcctggccaacacggtgaaaccttgtctctacttagagtacaaaaaaattagctcggtatggtggtacgcacctgtaatcccagctacttgggaggttgaggcaggaaagtcacttgaacccaggaggcagaggttacagtgagccgagattgtgccactgcactccagactgggggacaagagcgagactttgtctcaaaaaaaaaaaaaaaaaaaaaaaagaaagaaagaaaagaaagtaatgacaaaacatcacagaacaggggaaaatcccatttaccctgatgtgattattacccattgtatgcctgtatcaaaatatttcatgtacctcataaatacatatacttaccatggacccataaaaataaaaaaatttaaaaatttaaaaagttataagagaattaggaaatttgaacagtcactgcatatttgatgatattaaggaattattttcttatttttataatataatgatattatggttctattcttaaagtccttatcttttatatatatttacatactacaatgctgaccatcattatattgtgatgagatttttttaaagggtccttaaatgttcatagaggtatttatgaataaaatgatattttgcctggaatttgctaaaaaataatccagggttttgtttttgttgttgttgttgcctttggagagagacggtgatactgtggatggttgtcctctccaaatctcatgttgaaatgtgatccccagtgttggaggtggggcctagagggaggtgtcagatcatgggggtgcatccctcatgaatgtcttagtgccatgcccttggtgatgactgagttctcactctattagttcactggggagctggttacttaaaagaagccttgcccctcctcctcgctgcctcagtatgtgacatgcctgctccctctttaccttgccatgattgtaaacttcctgaggccctcaccagaagcagatgccggcagccactttctgtacagcctgtaaaactgggggccaaaataaacctcttttctttataaattacccagtctcaggtatttttttatagcaatgcaaatggactaatacagaggaattataggtgtaacaagatggatcagatgttgctaactgttgaagtttagtgatgattgtatgtaaaggttcattcataattttctcaacttttatatgtttgaaatttcccatgatagaaaattttttaaatgaacaaacagttctatccactattctctaaaagtgtgataacctctgagaagggagtaggaagctttgatggatgggcagaaataagtcctagccaggtctatggagaatactgctctgggagatccctagctcaggagtcttaaacccctgggctgcaaaccagtaaggtctgtggcctgttaggaactgggccacacagcagaaggtgagcggcaggccagcaagcattattgcctgagctctgcctcctgtcaggtcagctggggcatcagattctcatagacctgtgacccctattgtgaactgcacatgggagggatctgggttgcatgcttcttatgagaatctaactaatgcctgatgatctgagatggaacagtttcatcccaaaactctatgcccaccccctgctcccaaggaaaagttatcttccatgaaactggtacctggtgccaaaaaggttggggactgttgtcctcgctgattgtgatcaagaccaagctgtagaatgctatgtgtcttcttaaggaacttttagctaggcaagtgtcaggagagataagtccaagttccagtgttcaatgctttgttaatttagaccccacttgaccaagtccattttattttttttatttccacattaattcaagtgtcatcatcctacaagattcagctcaaatcctacctcttcctcactcatctcttagctagtgatctccctttttccatatccttttaagtggattgtttcctgactgagtgtaggctccttaaaaccagggaccggcagggcacggtggctcgcgcctgtaatcccagcactttgggacactgaggcgggtggatcgcttgacctcaggagtttcacaccagcctgggcaacacagtgaaaccccatctttacaaaaaaaaaaaaaaaaaaatagctgggtgtggtggcttgcctgtagtgccagctacttgggaggttgtagtcctgtagtcccagctactgatacttgggaggccgaggtgggaggattggttgagtccaggaggaagaggttgcagtgagctgagatcgcgccactgcgctccaacctgggtgatagagtgagaccctgtcacaaacaaacaaacaaacaaaaacccaaaaccagggaccatgacaaatttttaaaatctctcagccccaaaaataatactatccacaaagtcagagctccattaatactggaataaaggttaaaagagcccaataagtagaagtagatgagttaatgatttttaaacaagtggcagtctctctgtcctggtagtttcaagaaacaccactccgattcctattttgaagctgctggattttttttttttttttttttttttttttttaacagagtctcgctctgtcgcccaggctggaatgcagtggtgcgatcttggctcaccgcaacctgcacctcctgggttcaagcgattctcatgcctcagcctcccgagtagctgggactacaggcgtgtgccaccatgaccggctaatttttttttttttttgtatttttagtagagacgaggtttgccatgttggccaggttggtcccgaactcctgagctcaggcaatccgctcgtcttggcctcccaaagtgatgggattacaggtgtgagccacggcgcccggccagctgctggatattttgaccacctcaagtacgctgagcacgaaatcagtgcatctggcagtacacaggagcttgaaatactttttttaaaagttgttattcaaactgaaggagtttttccctgtggtctgtaatcgccacgtgcccgttctgtatacagccagcctgggtttttcaatcccacgtccgctacctaagagaacaccaaggcttggagtgagtatggcacaatcagcttcagatgttaagcaaatattccaacctagagtaggaaaatggaatatggacggggctttatgaaggtgcatggtcaggcaaaggatcttagtggatgaaagacagtaaagattcatcccaaccaaagaccaaaaatgacacatatgtatgagcaaaacatcaggaagaacactcttatgtggaaaatattacacggaaaacaaaagaagagtaactttttcccttttggtttatcccgctctggtcctcagggcgatagctaccacctgacacacagcgacctgggaaagagggaaactcaatcactgccctcgcggcccggggggagcccggaagcgcgcccagagccaggtcccgcgcgggcgccaccgagcgcggacctccctcgcatcctagagcggccgcgcgggacccggccggcggcgcacttccgcccgggcgcattgtagccccgcggacagctgggccagggtgcgggcctgcgcctccctcggctcctggcgcgggcctcggggagagggtgagtgcggtagggcataccagaggggggcgggcgcgcttcctcgggactcgccggctcgaccaggcacggcccggcgctggggacctaagcctggggagcgcccgggagcgaggacgcgcctcgttcaccgccccgggccggagtctcggcgggccggagcctcggccgcccggcgccgccgcccacccagcctttttcgaggccaacacggtctcgtgggggagcctgggctctctggaggccggaaatctggcctctggcctgcctgtgccttggcctcttactctctgccgcccggcctcggttctttcagctctaagatggaggacagcgatatctgccctaggcacaccacagggtgattgcagggttgacactgcctgcctgaaaacgaaggagcgccggttctcaacccggcaaccagtagaatcgcttgggaagcctccaaatgctgatgccccatcatcaccggggaattgtgatctgcggccaggaccgagatccacgggcccagagtgaaatgacagtactgtgatcacgactggaatatgcacttcgccgaacgtggatcacagtcttgagaaagcaagcagctgggtttttgttttgttttttttccaagaagacagggacctaatctggtttgctcgcatttaattcctagtgcctagaatggtgcatgtcccaaaacatgcaccattgattaaataatttctgattacttcccgacctatttggagggttttcattatatttgttttaaaattattatggaaaccttcaagtcatatatgaaaattgaatagtaactgaactcccaattcatgatcaattctgtttcatctgttaccctctcccccactgtagtattttgaagcaaatctgaaatgtaccattccatctgttaccttgttcatgtttataaaacacaataacacctttttaaaacataaagccattatcagtgtacttagcacttcattttaccctctactatccagtcagcatttacattttcctagttgtctctttcctcttacccagtttgtccaaatcagtatccaaacaatctacacacgttatatttggttgatgtctcttagatctctcttaatctttttctcttgctctttattttgttccctgtattttacttgaacaagtcatttgtacggttcacgttttctacaaccaggattttgctttttccatctcggtatcctttaataagcaggtatttagacctgcagacttgttcaggtcaggttcgattttttggcaagagaacttaatgggggattactgtgtttttcacattgtatcataccaggagttagatagcatcttgcctctctttgtggaccttttatgtacaagtagcaccgtagggtaacaattgaccagggaatgccagcaaatacatgcaaaagaaatgagagaatatcaccttttggcaacccctaatgaaataatggatcctggcaatgatcactagcggctgttaacgtcagaaagagagacagctagacaatgcgtgctgcctaatggggtactcccatcagacagcacaccgtttgtcttatcaagtattcttggagtaatgggggtggtgtgtatagatgaaacatgattgcctatgagttaacagttgttgaagttcaatgatgggtgtatggcattgcattatgctaatctctacttctgtatgtgtctgaagtttttcagaataaaactttttttaaaaagattgattagttgagtagtgagtttaggtcaacctgatccatacattgcagttctctgttagcctttcactaagtgattctcaaatcggactccatgttaggatcacaggagaaggctttttattttatttatttactttttaatactaaaacatgtctcacttgcagaatttcctatctaaatgttctgggatggagcccaattattgatagggttttttgttttgtttgggactacaggtgtatgccaccatgcctggctaatttttttatagagacagagtcttgccatgttccccaggctgctcttgaattcctggcctcaagccatcctgccacctcagcctgccaaagtgctgagtttacaagcaggagccaccgtacctgaccttcactgatatgttttaaaagctctccaggtgattctaatatgcccccggggttatgtactactgatctaaatccattatttgttagggatgacaaagtgattatattctattattccttctgcagttaatttgcctttacaaatgttaactttctgcattctgtttattcttacctatcttgcaaatcaataaggaagcctctgcaaataaagctcctttcttagcagaggaagacttgatcttggaggtgataatgtagagtaacacatgaaagggatgttagcaataacctcaacgctatgcttaaggtagagatgcaccaccttatgtatgagggttgggggcaggaaatatggggaggggctgtttcccaaaatggaagggaagactaggtagtgtgtagttagagaagcatgtttggccatatgacacatttccaaaaaaaaaaaaaaatcatcagcattaagtaaatataaatttaaaaaaaataaaatgccactcattgaaacataatgcaataaatttaaaagaaaagttaaccccccgcacagcccccaccccatcactttaattacccctgagataacccatattaacaggatggtgtgtatcctctcccacatcagactttctctgtcttacataaatgtaggggtttggggtattgttataaaaacgagatcataccatagccatctgtaacttttctccttgtcatccctccacaacagtagttacagaagactctattagctgcagaataaatagttgatagactaaataatagcacaaatgtacaataaaatattcagccattttcctattgacatttttagattgctttcatattttagccatcttgagagcaacacaatacacgtcattttacatagctctttattatttgggtagattaccaaaaatgggattactgggtgaaagcatataattatcaacagcatcattattactggtaatatatattccaaattattctccgaaagcctaatcgcaattcataactttgtcaccattagtttgtgacagtagccatttaccgtcatcctggttagcactgactagcattgctctattgatatttgcctgccagctgatgtgtggtaaatggtctctctttttgtttgttgtgagagtgggtcttgttctgtcaagcaggctggagtgcagcagtgaaatcacagctcactgcagccttaaccttccaggttccaatgatcctcctgccttggcctcctgaaaagctgggactataagcacatgcctccatgtccagctgatttttgttttttaatttttttgtagagacagtgtctcactatgttgcctaggctggtctcaaactcctgggctcaagtgatcctcccaccccagcctcccaaaatgctgggattgcaggcatgagctaccatacccagcctctttgttctttattttgcattccactaactacctggagactgaacccttatcttttatttattaacttaaattttttaaatagatacacgatagttgtttgaacccttttcatgcttataggccatttggatttcttctgtgattcatatatatacatatttatgtatatatatgtgtatatatgtatatatatgtatatatgtgtgtgtgtgtgtgtatatatatatatatatatatatatatatatcctttgcctgtttttctgttgcacaagtatttttgtattttgaatgcatttgcataaactttttttttttaggagcattaaccccctgtcataagggggcccaaacttttttttttcaggttttttttcttgtcctttgactttatgagtctcaatatatataaaagattttatttagtgaaaatgtctgtttttaaagtttctggattttatgtcttgccaataagggcttcccatctccacagttaaatgtataaacattctcctaatttttttgaacacgttattggattttttacatttaaatttcttaactacgtgaagtgtatttttatatacaatgcaaagtgagcatctttctttgcttttttctctgctagaatagccaattatgtcagtgccattcattaaagaaaccacactttttacacctttgttatatactgtattgattccgataggtagctggtttatttctgaactttcccttcccttttacctctatttttgtgccaatattattgtttgtatgtatgtatgtatgtatgtatttgttgagacagagtcttactgtgtcacccaggctggagtgcaattgtgcaatcttggctcactatgactgccgcctcccaggttcaagcaattctgctgcctcagcctcctgaagtagctgggactacaggtgtgcgccagcatgcacgactaatttttgtatttttagtagagacagggtttcaccatcttggccaggctgctctcaaactcctgaccttaggtgatccaccctcctcagcctcccaaagtgctgggataacaggcatgagccaccgtgcccggcctattctgttttaattatgtcagattgctgtagtaaatgttaatacctagaaaagcaggtcaccactcactgctttttggaattttctcatcccttctcagacatttatttttccttccatatgatttttggattgtttctgttccaaaataaatcccactggaagtctgatagaatttccaccaaatacatctacattagcttaggaaggatgaacatctctgtgatatcaagtcatcctatcagggacataatgtgtatcttttattcgtgtgaatcttttgggtgctgttcctttcctgctaactttatttctggtaattttgtttttgctcttagaatgggtttttcccccatttctgtttttatcttgttattgctaagactgagaagagttactgaagtttttgtatattttatatctagctgtcagtcaaattctcttacagtagtttttcttaagcttctttgttttcttccctgccatcaatgtggataatctataatcagttatgtataaatttcagttcattctaatatattctgtttgatacatatattccatctcagaagtatatcagtgatgtcagatgtacctagaaatagtgaaaggaatagtgccaggagttggaataaacctgcacattcaacaggttgttgctgatcacttaaaatagcagagtcccaagtcctcgtgagtcatggaccatgtcatgtagggagtgagacatttgttcagcattattgtgaaatatcagcatgactatagagcataatagagcattactgttatgattgttcagagaaagggaaagggctgatcattatgggcatcagagacaccatatggtgagtatcattaaataccatctcttgccctgtatctcaactagagttgttgttgtttagtgtttattagaaggattttttttaaaaaaattagtaagtagaaagtacagagtgttcccatatactctcttatccctcacccctcagtttccccttattaacatcttgcattaatgcggtatatgttcagaagcttaagggctcatgaaaaaaaaatgaaaaatgtgctacatgtgttacagttgttgagccaatattgatacagatacactgtcaactaaagtttacattagagctcattcactctagtggtgtttattctgtgtacagttgaccaatgtataatgacatatgtctgtcttactgtatcatacagaatcgtttcactgccttaaacatcccctgtgctctgcctgttcattcttccttctctcaccctgtatcactagcaagcacgatttttactgtctccatagttttgcctttttgagaacatcatatagttagaattcagctatagtttttaattgcctgggtttggttatttttgtttgtttgggtgtgtgaacaattatacaagatttgttaacttgtagttttagccaagttattaaaaccttactgtggatatgtgtggaatactatgagagaccaagaatccagactgttctaaataaccaaaaagtaataatagagataaatattacaggaatatgtttttggtacagtgatatgaaataatccccagatgatctttctgttgcagggtggaagatgtctatggatgtgacattcctggggacgggtgcagcatacccatctccaacccggggtgcctctgctgtggtccttcggtgtgaaggcgagtgctggctctttgactgtggggagggaacacagacacagcttatgaaaagccaacttaaagcaggttagtgtgccttcagctatctcattaagatttttttgttgttctgcttcattttcttggctctccttggacattttgtttagaaacagccctgatggttgcatcccacttcagtgctacaccctggtgagacttggaaggcctgcaggcatctggccacgtccactgaacttcatttacttatttacttgcttttcatttatcctgtagatgctgaaagcaaggattcatgtaggcttggggtttgggaaatgtcgtgggatacaccaggcatattagatgaacactgccttagcaaggaagcagtgtacatacttacctccaccaggagatagttttcatgagaggatgcaaagggtaggaaatgtttggaggagggagatgttgttttcctcttggggttatcagggtaaacttctcagagaagttgacctgtggattgtcaaaggaggaggaggaatttcagggctgaggagaagaagggcatttcaatcagggggaatggagtgagcagaggccagcacctgggagatagagcagtccagtggtgaaaagcttcagctcagagtcaggcagacctgggttctagtcctggctgtgtcttgggcctgtgaccttagcatatcagcaaacttcaactttactttcccgatcttgaaaatggggataaaaagtctacttagaaagggtgttatgagaattacatgtaatcatttattctctgtgtgattgcctctttctcagttaaatcttagctcagatgccatcttctcagaggctttcccaaatcctcctggattaagtagttcctctctcaccccagtcattcctttactttgtcctatttttattgacttcttagcatcatcagtatctgaaattatgttatttagtttgtttctgtgttctttatctccctatactgtaaagtacgttccatgatcatttatatacctagtagatgcctagttatatctgttcaactaggcatctactaagtatataaatgatcatggaacttactttagtgaatggataagacgtttagcaacttagcacagtgcctctcacttattaggtcttgataaatagtattgaagtcattattcctacaactcttcacagtacctggcacttggtgactaaaggaaagatacttctagtgttcagggatctcttggtccagtgatggaaactgacatgcaaacggacagtaatcaatcatgtaatgtgataagtagaataatggaagtattttctaagtactttggagcacaaaggagggggaagtaactgaccattcattcattaatagaaggcatcccagagattgttaacagttgagctaggatccaagagattcatagaagtttttctgagagagaggtagagatggacattgagggaacagacaacaaagtgagcaacaagtaaggaagtttccaggaaagaactggcatgttggggagcattgagtacttggctaggctagatggaactaagaatgctgaaaaggtgagggctgactgtgaagtcctctgtagcatagtaagatatttagactttattgttctactgggaaaaaggaaccattcatgtttttaagggggaataatgcaatctcgtttgtgttttaggacagagttttctgatggcacatgtattgggagagagagaatagcatcagggagaccagttccaaggcaattgcagttcacttgtatcagttcattttcatactgctatgaagaaatacccaagactgggtaatttattaaaacaacaacaaaaaagaggtttaatggactcgcagttcacatggctggggaggcctcacaatcatggtggaaggcaaaggcagagcaaaggcgtgtcttacgtggtggcaggcaagaaagcatatgcaggggaaccaccctttatcaacccgtcagatctcatgagacttattcactgtcgtgagaacagcatgagagaacctgccccccatgattcaattacttcccactgggtccctcccatgacatgtggggataatgggagctacaattcaagatgagatttgggtgggacatagctaaaccatatcattccacccctgactcctccagaaccttatgtcctcacatttcaaaaccaatcatgccttcccaatagtcccccaaagtcttaactcattttagcattaatttaaaagcccacagtccaaagtctcatctgaaacaaggctagtcccttctacctatgaacctgtaaaatcaaaagcaagttagttacttcttagatacaatgggggtacaggcattgggtaaatatacccattccaaatgagagaaattggccaaaacaaaggggctataggccccacgcaagtccaaaatccaataggacagtcaaatcttaaagctccgaaatgatctcctttgactccatgtctcacatccagggcatgctgatgcaagaggtgggctcccattgtcttgggcagctctactcctgtggctttacagggtatagcccacttcctggctgttttcatgggttggtgttgagtgtctgcagcttttccatgcacacagtgtaagctgtcaatagagctgccattatgggttctggaggacagtagctctcttctcacaactctactaagcagtgtcccagtggctatgtgtgggggctcacaccccatatttcccttccacactgccctagtagaggttctttgtgagggctccacccctgcagaagatttctgcctggacatccagatgtttccatacatcctctgaaatctaggtggaggttcccaaacctcaattcttgacttctgtgcacccgcaggcccaacaccacatctaagctgctaaggcttggggcttgcagtctctgaagcaaccgcctgagctgtaccttggcccctttaagccacactgggatgcagggcaccaagtcccaagactgcacgaagcagcaaggccctgggcccaggccaggaaaccgtttttccctcctaggcctctgggcacgtgatgggaggggctgctgtgaagacctctgacatgctctggcaacattttccccattgtcttggtgattaacatttggctcctcattacttacacaaatttctgcagctagcttgaatttctgctcagaaaataggattttcttttctgttacatcatcaggatgcaaattttctgaacttttatgctctggttccctttaaacataagttacaattccaaaccatatctttgtgaatacataaaagtgaatgcttttaagagcacccaagttacttcttgaatgctttgctgcctagaaatttcttctgccagataccctaaagcatctctctcaagttcaaagttccacagatctctagggcaggggcacaatgctgccagtctctttgctaaagcatagcaagaatccctttgcttcagttcccaataagttcctcatctccatctgagaccacctcagcctggactttttggtcaaaaccattcaacaggaaattccaaactttcccatgtcttcctgtcttctgagccctccaagtctctaggaaattctaaaccttcccatattttcctgtctccttttgagccctccaaactgttccagcctctgcctgctacccagttccaaagtcacttccacattttcaggtatccttatagcattatcccactctaccagtaccaatttactgtatcaggccattttcatactgctatgaagaaatacccaagactgagtaatttatttaaaaaaaaaagaggtttaatgaactaatcgcagttccgcaaggctggggaggccccacaatcatggtggaaggcaaaggcaaaggtatgtcttacatggtggcaggcaagagagcatgtgcaggggaactcccctttatcaaaccatcagacctcgtgagacttattcactgtcacgagaacagcatgagaaaacctgctcccatgattcaattacttcccaccgggtccctcccatgatgtagggattatgggagctacagttcaagatgagatttgggtggggacacaaaccatatcatcactgtgtatatgtgtgtgtgtgtgagagagagagagaatgaggatattgaagtatagagatggagatgagagattcaatttaagagatacttgtagaaataagaggagatggtcactgaatgtctagtgtgtgaggaagtgaagaattaatacaagttactgatggtgatgtcctggacctagagaagaagtcaggaaaagagttgttggaggaaggagctaatgcatattgtttgggacatatggtaggtacaattgaaccgtagttatatactgtcttgtgttgaaactttgagataattcaggtgctattctttgcttttcttggatcgtacagagattcctttcatgagaaccttcatgagagccctctggacaggcacaggccagagtagagacttgacagttaacattttagacagtaggagttgaggtggcaaggtgtactgaaatagaaacaagaaattgttaagtgtgagtaccagaggtttggctgtggggatacatctttttatttaatacttgtgttagttatctgatactatctaataatgcataacagattataaatttagtggcttatttgcatttattatctcctagttactgtaggttagggagttcgggcctggtttagctaggttttctgcttcagggtctcactaggctgcaatctaggtgttggctggggttacaatttcatcagaggcccaactggggaagattctgcttctcagctctttcaggttgttggcagaacccttacagtggtaggacagtccaccctgagctccttgagttctctgcattgtaggtttctgcttcatggtagcttgcttcttcatagccagcatgggagaaggagactctagagtaagtctgctagcaagatggagtcttatgtcccataaagtaatcgcattgcattcttgtgccatattctgctggttagaagcaagtcacaagtcccagccacactcaaggagaggggattgtaggacgtgaacaccaggaggtaggggccacagggatcacctaaagtatccaccacaagtatattttacagttcctttatatatgattttctgttttttgtttttttttgagacagagtcttgctctgtagctcaggctggagtgcagtggtgcgatctcggctcattacaacctctgcctcccaggttgaagtgattcttatgcctcagcctcctgagtagctgagattacaggcacataccatgacacctggctaatttttttttgtatttttaatagagatggggttttgccatgttgcccaggctgatgtcaaactcctgagctcaggcagtccacccgccttgtcctcccaaagtgctaggattcaggtgtgagccactgtgcccagtctatataggatttaaataaacagttggagttgggcacagtggctcatgcatgtaatcccagcattttgggaggtcaaggcaggaagatcacttgaggccaggagtttgagaccaagctgggcaacaaaaagagactccatctttacaagaaataaagccagatgtggtcccagtgggaggctgaggcaggaggatcctttgagcccaggaggtcaaagctgcaatgagccatgattgagccactgcactccagcctggtgacagagcaagaccctgtctcaacaaataaataaataaacataaatgcatgcattcatacatacaattgataaatctaatcttggccaaaaaaacccaaaacaaaataaaagaaaacaaaaaaaacacaaccccaaaagcccaaaggaacctttagtttactacatttctatacgcttagaaaaaaaatttctgaggccaggcatggtggctcatgcctgtaatcccagcactttgggaggccgaggcaggtggatcacgaggtcaggagtttgagaccagcctggccaacatggtgaaaccccatctctactgaaaatacaaaaattagctgggcgtggtggcgggtgcctgtaaacccagctacttgggaggctgaggcaggagaatcgcttgaacccaggaggcggaggttgtggtgagccgagatagtgccactgcactctagcctgggtaacagagtgagactccatctcgaaaaaaaaaaaaaaaaaaagaaaaatttctggccgtagagaggaaggtgagatagtaatcctagagcattacctgtgactctctagtacttcagatgcccctagtctcaaactggaatgcagcaccctcagtacatactaatttctctccataacctattatggacctatcattatttgattcattgaaaccctttgagcttgtactacctctagggataatggatatattacatagtggtgaagtctgggatttaatgtactcatgaccagataatgtacattgtacccatcaggtaactaattatccctcaccacacacccccaccccccgccaccctcctactcttccaagtcttccatgtatattattctacaccctatacttatgtgtacacatgaaatgattattaaaagtattataagagcatgattttttaaatgatataaaaagtataaatgcttattgtaaaaattcaaacaaaagagaaaagtgtaaataagaaaagtccaagtctcccctcataggtgaattttctatgtacatagatatggtgatagtatgggagtgtgtgtgtgtgtatagttctgcatacatagaattatactgctcttggcataacctgcttttttttttcaactgagcaatgtatacaaacaatatattgcagcttttccaaatccagtcaatatacctatgtcttcatttttagagaatgctcaatattccattcctctgtggatgacatattcccccataacttccttgttcccaaggaaaagggaactcaggcatttttgtgtcttcatttgaaagcttcctcatacctttgataattgtggttgccattccttctccctttgaaatcaggtttcttgaaaaatgaagtatttgtctccttgaaactgtgataactgtaggaagcagtttgtcacttaatttgcctcacttcgagttcacaggttgttttggtgttcagtttggctttgttttagagtggatagggaaagggcccagaaagtcagatattggtagtttttaggccactgggggatctggactcagtgactgctatagttcttttttttttttttttttttgagatggagtttcactcttgttgcccaggctggagtgcaatggcgtgatctcggctcaccacaacctccacctcctgggttcaagcgattctcctgcctcagccacctgagtagctgggattacaggcatgtgccatcacacccagctaattttgtatttttagtagagacagggtttctccaagttgatcagactggtctcaaactcccaacctcaggtgatccgtccacctcagcctcccaaagtgttgtgattacaggcatgagccattgcacccggccctattgctgtagtttttttgtctgcagagtcctcaggtcacacatggaggtggcttggcaacccggacagggagacgggggaaatgaggaattcaggcagtaaaaaaacagcaaaaaggagcatatcgaggaaacttctagagtgcctcctggggattcgcaaagtccacaatcagcctgtgccaatctgttgttctctgttgctggctgggcttggatgtagtaattctggaaagacttgcttggagaacacttgatgttatagaacaaatcacattacagtaaactattcctgttcttttatggtatcaataaactgtttctgtacttttatagcatcaaacgtttaaaataggtgggccttgagcaaaggaccagaagcctcttttgcactagaaatgtgttaatttttgttgttacttttgaaatgtcatgtggtgtgtctcagaaaatgctgatgtggcatcctgccatattccagcaataaattcagtttaccattggctaaaccaagttataacctaagccaatatgcactgaaaaagctgttgtgttagttcagactgaaaggaagaatggacccaagtacccttacataatagcttaggggatcggctttcctgcattctgccttctgttgcccaccttccttctcagttcttcatctttttccctctcctacctcccttctccctcctccttttcccctcccttcctcaccgttcttcctttttctccatcttcttccacctcacccagacaagcaggccgtgacttgattggttaatcgctgtccagtatagggagtccttaaaaggcaattttgggttcaggcactggtccagtcagttggagccagtggaacattttgttttcctggaatatatgtttgcttttctcagagggagcagtagggggcaatgtaattgctagatgcttttaatacttgaggcctatctatttaatagttaagtgaattattttggtacacttgtatattttacttggtgttttttttttttttttttttttttttgagacagtttcgctcttgttgcccaggctggagtgcaatggcacaatctcgactcacgcaacctccgcctcctgggttcaagtaattctgctgccttagcctcctgagtagctgggattacaggcatgcgccaccacgaccagctaattttgtatttttgtttagaagagatagggtttctctatgttggtcaggctggtctcgaactcccgacctcaggtgatcctcctgcctcggtctcccaaagtgctgggattacaggcgttgagccaccgtgcctggcctacttgtttttttatgtgacagaaaatgtattaaaatactctgaaagctgtaaaactatgtaatatgaagatgtcttatgaaaaatgttatatcttattgaaaccatctagtggggctaggcaccgtaatcccagcactttgggaggccaaggtgggataattgcttaaggccaggagtttgagaccagcctgggcaacatagcaagacctcatttctacaaaattaaaaaaaaaaaaaaaaaaccaggcatagtggtagggtctgtagtcctagctacttgggaggctgaggcagtaggatcacttgagtccaggaggtcaaggctgcagtgagctatgatcacaccactgcactccagcctggatgacagagcaagacctgtctctttaaaaaaaaaaaactattaaaaacaaacaaacaaaaaaccacctggtgaaataaagcctgtcttcttgtttttggaatcatgtagcaaaatgtaaatgaataagtttatgatgataagtagaacttttaaattcaatttactatttttaatgtaaattgttaggcttgtttcaaatagctttgtatgggtttttagttaatgaaaaatttccaaacgtatttctctatctcaatcaaaagggagaattaccaagatcttcatcacacaccttcatggagaccatttctttggccttcctgggctcctctgcacaatcagcctgcagagtggctccatggtgtccaaacagcctattgaaatctatggccctgtagggcttcgggactttatctggcgaaccatggaactctctcacacggagctggtcttccattatgtggttcatgaactggttcctacagcagatcaatgtcctgcagaagaactaaaagaatttgcgcatgtgaatagagcagacagtcctcccaaagaggaacaaggaagaactatcctgttagactcagaagaaaactcataccttctgtttgatgatgaacaatttgttgtaaaagcatttcgcctctttcacagaattccctcatttgggttttcagtcgtggaaaagaaacgcccaggtaaactcaatgcacagaaacttaaagaccttggtaagtgtttttttgttttttgttttttcccgccttctcatcaatagggctcctgttgactgaagctataagaaatgtcatagtaaggccaggagttgtggctcacgcctgtaatcctagcactttgggaggccgaggtgggaggatcacttgagttcgggagttcaagaccagcctgggcaacatggcgaaaccccatctctactaaaaatacaaaaagtaactgggtgtggtgtcatgtgcctgtagtcccagctacttggggggctgaggcaggaggatcacttgaacctgggaggtcaaggctgcagtaagccaagatagtgttactatactccagcttgggtgacaaagcgaaactctgtctcaaaaaaaaaaaagtgtcatagtaagcttccactcctctatcccaggcctgaaactgacaatttctccacttagtccctttgtccaaagtttgcttattaaggaaaatccatggggccaaaaaatgctatttagagcaaaacccaagtatacatttgaatcctgtcttcatctccctggatccacattcttagtctgtcttcaccttatactatcttggttggcaaggtgatttgggtggtagtggtggtggttttaggtccaggctttattttttcatgtcttccctttgatacgtgtttttgatgacatcttcggtctgagaatttttgccatcgttcttaaccttacaactgcaaccatgtgctttcagagtttacttctgtatctactttgcttactaatttaaccttgattaaattaatttggtattcaaaaccctgtgcctcaaccagttttagatatcagggttcatcgtagttgaaagcaagcatacagaggtgggcttggggcccatctaaggcttcacacctcctctatgctaagcgctaagccagcatgcatgaggggatcttttcagcacctcttgtgaggtagagtccaggtacattatatctccagtgtcactgccttcacaggcatgctgtggcagtgcctgtaaaaagcacagtggcattttgtgtgtgtttgtttttttatttatgtgatctcttcctcaactaaaacaaaatgctagataatgaggaaaagtgacttaggccaaggatatttttattacctgaaagcctgtggaaatactattatatttggaaactttaaacatgatctgtgttggaattggtggtcatactatactagtttgtaagtattgtccatagtgatgatcaggtcttactttaaattaatacgagatttaagcccactttgataaatgtggaactgcccctgtctgccaagaagactaataatgtacaattgcctgaaaaaatgctccttgatcttgtaatacaaacaatcctgctaacaatttttttattaagttactttgtaggtacttgttttgactaggtgttgattatatcttttttttttttttttttttttttgaggcagtctcactctgttgtccaggctggagtgcagtggtgtgatctcagctcgctcactgcaacttctgccccctgggttaaagcaattcttgtgccttggcctcccatatagctgggactacaggtgtgcaccactgcacctgcctcggcctcgcacaatgctaggattacaggcatgagccagtgcacccagcctgactatatcactatttaaatacactctcaaattttacccaaaggtgagcttattaaataaagcactctcaaaaactgttgtttctgtgcacagcagagaatcaagaatgttacagtgactacaataaggtcctagtgatacttaggagactaaaacttgtctgacatgtatgcatgggaaatgtttcaagtactaaggcattgctaatatcaatcaacactgaaattttaaaaatgtataaatccagttttccacaagtagtaaaacatttataacaattatggatgccttttccattagctatttgcaatgctgttaaaatagactcttgaaaagtcataaattccattcctatgatgtaatgttatctgccttcatcattaggtgttccaccaggtcctgcctatgggaagctgaaaaatggaatttctgttgttctggaaaatggggttacaatttctccccaagatgtcttaaaaaagcctattgttggaagaaaaatctgcatattgggtgactgctctggggttgtgggtgatggaggagtaaaactgtgctttgaagcagacctgttgatccacgaagcaaccctggatgatgcccagatggacaaagcaaaggagcatggccacagcacaccacagatggcagcaacatttgcaaagttgtgccgtgcaaagaggctggttctgactcacttcagtcagaggtacaaaccagttgccttggccagagaaggagaaacagatggcattgcagaactaaaaaagcaagctgaatcagtgttagatctccaagaagtgactctagcagaagattttatggtgataagcattccaatcaagaaatgaaaccagtgttcctgagtgcacactgacatgtctgtgaatatgttactgaacctatagtccagtttttttatttcttgttttagtctgaaattatttgggccctaataatcctaaaaagaatggagctgcattgatgaattggctcagtatttaaagggagcaaactttttgataataaatctttttaagagaaaaaaaacccagcatcctttttgaagtccagatttgtcaaaatgatagactattcagttatacatcttattttgtgctactaccacagatagccaatattccatgcagtcctgggcttagcttctgcccagctttattgctgctattggcaaagagcacaggactcagccctcgtggctaaaaatggtattttggcagtttgtattgaatctgtttgtgttattaacagaagagggagaaatgtcatgagacgttggacaggcaggattgatgatagcatgaccatagctttgctggaatactgaatgcagggtttggctaggtgtttattttaacattttattaaactttctatttgggtcttaacccatggttctcagctggggtgacactgctcctctagaagcaggtttgaaattatgggtatgttttcttgtcacagtgactgagtacggtggtggtagtggtggtactactactactggtatttagtcagcagggataagggatgttagctgtcctgcaaagttttggtcagtcatatacaataaagaatcatctcaccccgaaatgcaaattgcaggcccattgagatacacagcaagttagtttatactcttgatgtgaatatagtttaccaaaattagtgacataatgagtggaattactaggtaagtcaaatcctaaagagtgaatgtgttagaattgcagtgtcataccaaataacattcaaaagaaatgagccattaagtgaagcttatgaacctggaggtaaaaaatgcttatctgttaaactgaggtttcattgacgtgtccctattaataaacgttatttgccccacaatgtttcttaaaacatgctccatggaaagctagccttcagtgctgattcactcagaggagctcctcagtcaaatcagtttgggaaacacattattgctgtctgtcctcctaggagtggtgtagtgtccatcaacatactaaaaacagtattgcttcaaatgatcataaaccagtgtttgatgccagaaagacctgatcccagagtcccattctctgatatgtggtagtacctctgtgtggtctggagcaggtaacccactctctgagtttcttcagcttgttcatttcaaaaatgggaaaaacagtaagacctatgtcatagattgttaaacaagacaacatatataaggagcatagcacattgcttgaaggtgttgagaaatcctgcagtacagaggcctgtcagctctgttgaacccctttctcagtcctatttcaccaggtactacctgttaacatctcaggaacctagagagctttacagcacacatatttagaaacactgttgtagtacttactgttcaatttcctctgggttctggggcttctctggccaaattttttgactcctggctagttgtggagactccaaagtagtgatgattggctgggggcagtggctcatgcctgtaatcccagcatttggaggccaaggcaggcggattgcttgagcccaggagttccagaccagcctgcacaacatggtgaaaccccatcattacaaaaaatacaaaacttagccaggcatggtggtgtgcctgtggtccagctactcaggaggccaaggtgggagcctggggcggttgaggctgcagtaagccatgatcatgctattgcactccagcctgagcaacagagcaagaccctctctcaaaaaaaaaaaaaaaaaaaaaagcaaaaaacaatgatcaaaataggtctggttacttaagatatgatcattctgatgcagtctctagaatggtctgtcttactatagactctgcccgcaaaaagtgccaaattttgatcatgcataaagcatgccatggtttctaaattcaattcaaataagcattaattagacatctaatgtacctaaacttgtgcaagaggctaggactctaggactagaatggctcagatgagtatctctaatgcatgaagcccctgaggatagagattattatgtcttagtcactgccacatccttagaaatgtccacctagagctgagtgcagtggtgtgtgcctgtagtgccacctactcaggaggctgaggtgagaggatcacttgagtccaggggttcaagtccatagagacatagcaagactccatcttggccaggggcagtggctcacacctgtaatcccagcacttggggaggccaaggtggatggattgcttgaggtcaggagttcgagaccagcctgggcaacgtggctaaacccccgtctctactaaaattacaaagattagctaggtgtggtggtgcatggtaatgaaactagcccatttcattactgaacttaccggaaagaatttacaccacctctttggtggtgccccattcactgagtactaagtaagtgccagactttattgtgttggtagtacataaatgaatagacaaatggcaaaattccagccctaagcacacagcctagtgaaagagaccagtagataaaaagtaaatctgtagttgcttcacatgttctaatcttgtatcctgggcactcgaattttgctgttcctgagcattacttggtagctgacttgagccatgcccttagaatcaggctctataaatacatatgggctaagcctcagaggccatgggaatgtggaaacgatatgttgggtcaagtgtagagtatcagtccatgatgagaactttttctagaccctcttctgggctagaatttgttttcagtgatagagacattctaagaatttgtggagctagaattaagaaagaagtttatattggacttctcggaacctgtaatctacccaaggatttgactcttaagtggggagggtgaccatattatgtattgtgtcccaaatttatttgattactgaatcctctttttgccaaggaagatcttggaactttagaaatgccattctccatacgttgcaaaattattctatttatgttttttacctgcagaatttattgagctcatgatttccatgtctacacttaatgtattacttcctttgtcctaaactgactcaattgtaaggaatccatacatacctacttattttagattttattttattattattattattattatttgagacagagtctcattctgtattttagattttaaaaaatgcacacttgtggccaggcaccatggttcacctgtaatcccagcactttgggaggccgaggtgggcggatcacttgaggtcaggagtttgagaccagcctggccaacgtggtgaaaccccatctctacaaaaattagctgggcatggtggcgggcacctataatcccagctactcgggaggttgaggcagaagaatcgcttgaacctaggaggcggaggttgtagtgagccgagatcacaccactgcactgcctgggtgaaagagcaagactccgtcgcaagaaaaaagaagtgcatgttctaattctccaaagttgtttacacttgcccagatagaccctaaatcagctctgtttaatactcatgcctcattaatgcacttttaatgaactttgaattataaaagcagcgtatgtttggtagagaatttttttaagatgcaataaaagaagacaattattcgtaattccttcacccacagagagctgttatttctgatccagtggtccccaaactgaggggtgggtgagaattactcagggtgtgtaggtagacagcgatccttaggctctgttttcaaagacttaggctctgttttcaaacgtctggggtaatacccaagaatttgcatttttaataagcccccaaggtgattctgaggtatatgagtggcagaccatattgggagaaaaaaactgtctattctatgcgttttaaaagttttgcgtgtgtttagatattttgtatgtgcttctacctatgttggtatgtgtgtatattatacacatgtacacctgtatatttttacatgtaggctgacctcaactgtttttctcatttagcatattatgaggatttccccacggcattaagtgttctctgaaagcatgaatttaatgattttctattattgcattctatagatacagtatcacttaaccgtttttttatttggaggcagtgagattgttttccgttattataaataatactatcatgaatattcttatgcataaatccttgtatctctgagtatttccttccttagaattgatttctctgagggtgaaaatctgacttctttttggaggttctgggtaggaattgcccactggtttccatgctcttttacactcctagcagcagtgaataggagtggcctgtcttggtattctatctggagatgatacggagtatcatcagctcatgaccttgctaacgcttcttccccaagacattagtcctatgaagattattttcacctcccagtgcaaataactttgttatgtcttgcaagtaggacatattgtgatttccttgaatactcttatgccaacttaaaaatttggtagtttttactttaggggtaaaaatccttactgcttcaaatatgtccatgatagatgtacagtgaaggtacttttttactaacaaaggtataaatttatcgtgaaatgtgctggttctgtccttactgattgatggatttttcaggtaatgaatgagtcagtatttttcttacatgggaagactaaaaaggaagcgctggtaatgctctgaatgttccctcttggcaggataagaatagagcggggaggcgggtaagatcgcaaaattattttcttccttagtaggaagtaaacaatgtctaaaagtgaaaaacaaatagtactctaagcatagtatgtttttaaaaagcagaaggtggggaggagagactaccagatgaatagttaagagtggaagaaggggccagaagggtcaagggggtggggacagatggtcaggggaccgctattttttataagcctaatagtattagcactattttacattttaaaccatttgtgtgtattcatttagtttaaaaattacattaaaacacacacacagataagatgctgctctgagtaatcttaacaattgcgtgtctccccatgggtgctacaggcagttagcagctgctctcaagcctttgtaacattccagtcccattctccatactgcagtctgagtctgtgtgttttgtttttttcaaaatgcacatttgagtctcatgttccccctgcttgaaacttaatggtcatttcttacccaccttcccaatctaatcttcctctacacttctgcagccctagccacgtgggtcttctttcagtcctttgtcagggctttctgttgtcgcaaagcctttgcaaggcctgctccctctgcctggaatgctctttctcctctccccaagttaacccttcctgggccttcagatcacagccctatagccacagcctcagggaaaccttccctggcctccccactaggtagcatattactcttttttttttttttttgagatggagtctcgctctgttgccaggctagagtgcaatggtgcgatctctgctccctgcaacctccgcctcctgggttcaagcgattcttctgcctcagcctccatatagctggtactataggtgtgcactaccacgcccaactaatttttgtatttttggtagagacggggtttcaccatgttggccaagatgttcttgatctcctgaccttgtgatccgcctgcctcagcctcccaaagtgctgggaacacaggcatggtccactgcgcccggccgcatattactcttatagcacctgcatctgaccttcctggtgcttggcacttactattttcattttgcttctgtgagcgatgtttctctttcccattagcattgtaagcttcccaagagcagaactgtgtcttttgtttccctctgtgcctagcttggtgcctggaacatattaggcactcaataaatagtgttgactggttcagttttccccgtcatcctgttattcagttaatatgcagtgctttgttttcctaggaattcttcctgattaatattaaaaacaaacaaaatacccacccctagtctctgaaataaaagtgggaaggaggataatggttgtctgtgactttaatggggtgaatccttttaagtactaattttaaagctttagttttgtgtcatatgatatgcagacagaaacctagacccatgggaatgattggaaaaaagatttactctgcctaaaaagttgggatgttagcttttgcaatgtataggggaatcagaacagagaggagacagccaagccccaggcaggagtctggagccctatgcaggtaggaaaaatgggaaaacttttaagaacacagatatctgatactcaattttatgttgcctgcattgcttggaattaaatctctactttctacctaactttctttgaagtctgctagacacatatgacttggggatccctccccagccctgcacaccaccaaaagagaacaagttctaaattccatgactaggttgacctggggggagaaaggacagcagggaagagagtgagacaatccccaaactaatacagttcacaggagctgaagtcagaggtgattacatgaaccaatgtttcccagttattttcagaaaattgtgaagaggacattgaccttaacatagcccatggaatgagagtgacaggggttgagccaatttcatgtatatcttaaaggacagggtaactccaactgcaatctagacacagatatttctgtgtccttgatatgtttcaagggttaaaaggctgtcatatccagtataacaaggaagttttttggggggaagcagtacctcagtttatccaaagcaaaaaatatttccacccctaaataaagctagctgagaagcactgctgctcagatgtcaggatgctaattatacacccagcagacatcgaaggtacaaagatgaaatgcagccacgaaaaagtaaaaggggaaagacaagggatcaagttgtccagctatataaatctacctttaattgccagaaatcattcaggcagcctcaggtagagaactacacaatgtttagttcactgtcaccaaatgaaaccaaggttatctgggttgttttctacattgttatggcttccagatgtcataggcttgtctgactatatctcttgacacatcctgggctggaaatgaccttgtcactcggccttctaaagtgctgggattacggttgttgacccagacatgggtaccttagaagtacccatgtctgggtcagcaactcaaatgctgatcccaactggcttacaaagggccttcccatggaatacattttcacacagctagcagataacagggcacaatcctccccagcatgcctataccgagaggcagtatagcctagtagagtggccttcaggctaggtaatagtatccctggagatatgtaaagacttttctaaggatacacaggcatattctcatatgaaatatttcgtagagtttatcttcctgagaattattgcaatcaaagtgttttgctgtagtattgtgcattgttccagaatgaaaagcctctgggataccagtgaaagggataattggaatattgatattgaggttgaaaaaaaatgaatgattaacaccttttataagttaggtagtttccaacttgttttgaacaaaactgaaggaggatctaatctgtccaatgatagatttgtttaagcagctttatggagatataattcacatgccataaaatttggtagtttttcatatattcacagagttgtacaaccatcaccactatcaattttagaacattttcagtatcccccaaataaaccccatactcattggcactcacacccactccttcccatctcccaaacctaccatccctaggcaaccactaatctgctgtctctatagatttgcctattttggacatttcagatagatggaatcatacattatgtggtccttcgtgactggcttcttctagtataatgttttcaagatgtatccatgttgtatcaatcctttattcctttttatgaccaaataatattccattctatggatataccacattttatccattcatcagttgatccaataatagattatgaaaaatattgtctacaaaacacctgtatcagaaatgaaaaatgagatattcctacagatcttatgtttgtaagatattgctacagatcttacattagaaagataaaaaaggatattataaataactccaaagttactgaaacaacttccttaaaaaaaaaaattgccagaactgacacagaaagtaaataggactaacaagactttctatttattaaagaaattgaatttgtgataaaaaagaaaccttcttacaaaaaaaaaatcttgagggccagattagtgaatcattttaaacaattgaggaagaaatacacctttcttctccaaacacttctggaaagtagaaaaagagggaacactttccaactcattttatgagtttagcataaccttgatgccaaaatgtaaggacattaaaagaaaggaaaattacatgctagtctctatcataaaaaccctgaagaaaataattagctaattgaatccagtgaaatatgaaaggaataagacctcttcataaaaggagtttattccaggaatgcaagattcatttaacatttgaaaatcagtgttttccacttaataaaataaatgaggaaaaactgtgggacaatctccacagatacaaaacattttttgataaaatttaatagtcatttgtagtaagaactcttagcttattaagataagagataaaagccaggcgtggtggctcacgcttgtaatcccagtgctttgggaggctgaggagggcagatcacttgaggtcaggagtttgagaccagcctgaccaacatggagaaaccccatctctactaaaaaaatataaaattagctgggcgtggtggagcatgcttctaatcccagctactggggaggctgaggtaggagaatcacttgaacctgggaggcggaggttgcggtgagccgagatcacgccattgtactccagcctgggcaagaagagtgaaactccatctcaaaaaaaaaaaaaaaaaaaaaagaatgagataaaacagcaactcaaagtactgttaaaagaaaaaaaaaaaaagggataggagagacccttaatgtgcaccaccacacccagctaatttttaaaactttgtatagagatggggtctctccatgttgcccaggctggtcttgaactcctgggctcaagagatcctcccacctcagccttccaaagtgctgggattacaggcattagccactgtgcctggtcatgtactatattgctttgaaggtcttagccagaccaatatagatagatagatagatagatagatagatagatagatagatagacagaatgaagattggaatggaagaaataaaactttcatcattagcaggtgacatgattatgtacatagaaaattttaaagaataagcaaataacctgttaggataaatagatgaatttaataagattgctgaatactcagtcaatataaagaaaatcaactttatgcctacattccaacaacaaactaatagaaaatgttttaatgatatcatttacagaaggatcaaaactatcaaaaatctaggaataaatctaatgaaatatatgcaaaacctctccactgaaaactacaaaatattattcagatgaagaaaagtaaaataaatggaaaggcataccatgttaataaaccaagaatattcagtattggaaagatgtcatttatccctaaatttatctgtagtttcaatgcaacccaatcaaaataactgtaggtttttatttggatatgtttatgaagaaattgagaaactgtttctaaagtttatataggcatgcaaagaccaagaatagctaggacaatcttaaaagaagaacaaaattaaaagatttacattatcggatatcaagacttacagtaaaactgcaatcacttagtataatattgttgcaaggaggacaaatagaccaatggaatagaaagacgttcaggggaaaaaaacccacacatatttagtcacttatgacaaatatgaaatttctgtgcaacaaagaaagagttgcctttgcaataaatggagagtcaatcagatttcaataatgaaaaaattgattacattgattcctaccttaaacaatacacaaaaatcaattccaaatggattttatatataaatgtgaatttagaattttagtatatgtgctgccgaggcaagcactaaatgtgaatatagaaaagctccctttttggagtaggcaaagattactaaaacaaaatcgaagcactaagaataataaagaaaaaggtagttaaattgaatgttaaaattaggaacttctattcataaaagacactatcaagagagtgataaagcaagccacagagtagtacagcatatttacaatagctgtagttgataaaggatttgaatctagaattcaatagtagttaggtgttgctacataacaaattacccccaaaacagtgatctcataatcttggtgggtcaggaatctcggtacaacttagctgggtacttctggcacaagatctctcatgaggttgtagttaagctgccagctatagggcagtgggttcatctgaagacccaagcgagggatccactttcaagcttcctcatgtagttgtaggcagaccttggtcccttgtcacatgggtctcttcgcagggctgcctcatgacatggcagctgatttccctcatgtcaagcaacctgagatagaatgagcacccaagccacagtctttttataatttaaccttgaaagtgacatctcattacttctgccacattctattcattagaagcgaatcagtaaatccagtgcacactcaagggtaagggactgcagatagcataaataccaggaagcagggtaattggtgggccatcagaggcagcctaccaaagaatttataaagaacttttaaaagtcttgatctaggtaggagttaatatgggtgtgtttactgtgtgaaaattaatctattcagatgtgatttgggtgcttttctgaacataggttatatatctgtggaaagttgacttaacatttttgatgaaaaactctaggcagaattcttaagattcttatctcctggttattaattaaagctctaatctaggcattactatgagtggattttgcagatataattgaagtcccagttgactgtaaaactatccaagtgagcataactcaatcggggagccctttaaaagcagataatttttcatctataattccagtgctttgggaggccaaggcaggaggattgcttgaggccagaagttcgagaccagcatggccaaaatagtgagaccctgtctctattaaaaaaaaaaaaaaagattaaatgatttaacatatgtaaagcacttagaacagaaagtgctatatacagatcagacattatcactattaaacttcaaattggagcctacgatgttccctcatcattcagaggaggtttaactcctttggggttttggaaactgccctcacagtgttccaccagcccagaggctgggtaaggagtgcctccaaccttctagattgggggccagggcacattgcttttgacttgtgttaaagccacttgccacatgttgctatcggacacttgaaatgtggctagtccaaattaagatgtgctgtaagtggaaaaaagtcactagattttaaagacagtatgaaaagaagaatgtataataatagttcaatcattttttacattgattataggttgaaataatattttggacatatcaggttaaataaaagacatgactaaaattaatttcacctgtcccttttttgcagtttctaatgtgggtactagaaaatttaaaattacctatgtggctcacattatatttcaactggacagtgctgctttagacagtctttctcaatgccagcagtcagagtggtcctttaaagatacaattcagatcatgtcactactctgcttaaaaccctccagtaatatcggatctcactcaagagtaagtcaaaatccagatcgaagtctaccagttcctgtgtgatcagcctccaccccaccccctctctcaggttcagtgtaaatcaagttccaaattttgcgaaacctgaagtttacatcatgggagaaagaaagggggagatgaacatgagttcttgctaagaaaaagtacaaattatgaatttatttatttatttagagataagagtctcgctctgtccccctggcgggagtgcagtggcgtgatcttggctcactgcagcctctgcctcctgggttcaagcgattctcctgcctcagcctcccgagtagctgggattacaggctgggtaatttttgtattgttagtggagacgaggtttcaccatgttggtcaggctggtcttgaactcctgacctcaggtgatccacctgcgttggcctcccaaggtgttgggattacaggcatgagtcaccatgcccagccgaataatgagtttagaattaggtactgtgatggttagtactaggtgtccacttgaatggactgagggatgcctggatgtctggggaagcattgttcctggatatgtctgtgaaggtgttgccagaggaggttgacatttgagtccctggactgggagaggaagacccaccctcagtgtgggtgggcaccatccaatcaactgccagagtggctggaacaaagctggcagaaaaggggaagaaacaacttcctgggtcctctccggtgctctcttttcctctgcaggatgcttgcttcctctcctcctgcccttggacatcagactccaggttcttcagcctttggactctgggacctgcaccggcagcctcctggaggctctcgggccgtaggcctcagcctgagggctgcactgtcggctttcctggttttgaagctttcaaacttggaccgagccacgctcccggcttctgtttctccagcttgcagacagccagtcatgggacttcgctttataatcctgtgagccaattcttcctgataaactcctttatatatacacacatatatcctattggttctgtccctgtggagaacctaatacaggttttggtatcaggagtggttctagaggaacataattttaagcataaatttcctttgtcggttttggggtttctggagttggatatctaatctgattagacccaaatgctaaagactctatttctaatagtatggacagcactaatagtccttggcttgaactgtttagagttacgcaaaataaatgcatttgatatttctgattccctgttcctaagaggcaaggagtttagtgactctatatatgatacctttgaacatttgtggagaaccaaggaatataatgaagttggctggttgctcctaagttcactgggcaaagtgatgaacgaaaaggatgagctgagggattctatttcctggttctagatacacatacatagccaaaaagtttctcagggtgccctgggtaagaatcttctcttctgtggacaaagagctgaaattgctgaaaatcagacacaagctcttatgcaagtggctgacctgcaatggaaggttcatgctcagcttcaccaagtgtctactgtcaaagggagggctttgattgggaaagaatgggaccctgtaagttgggatgggaatatgggggactctgatgaagctagggacacctaactcctaaattctaatgagccttttttgccagaggaaatggcatccccaccccccgtagtggcaacatacttttacccacacactccagtaccagcctttccatctttaagattaaccctgcattgccccggggaaacagggatgtcctcccttgaggcagctgccaggaaagacaatgctggttctcctcaggacccatccccaccacctgtccttgcctctggactctaactggactctagttcctacaggcccttagaggtgaggttcagggtatgactcatgagaaggcatgctatgctccaaatactaatcagactttttgggggctactggatgctggctccaactactcgagttttctaatttacatgagcagaaatccagggaacaggtatgggaatggatattaagagtgtgggataatgcagccaatatcatactgaatgggcaaaaactggaagcattccctttgaaaactggcacaagacagggatgccctctctcaccactcctattcaacatagtgttggaagttctggccatggcactcaggcaggagaaagcaataaagggtattcaattaggaaaagaggaagtcaaattgtccctgtttccaaatgacatggttgtatatttagaaaacccagtcatctcagcccaaaatctccttaagctgataagcaacttcagcaaagtctcaggatacaaaatcaatgtgcaaaaatcacaagcattcctatacaccaataacagacaaacagagagccaaatcatgagtgaactcccattcacaattacttcaaaggaataaaatacctaggaatccaacttacaagtgatgtgaaggacccttcaaggagaattacaaaccactgctgaacgaaataaaagaggacacaaacaaatggaagaacattccatgctcatggataggaagaatcaatatcgtgaaaatggccatactgcccaaggtaatttatagattcaatgccatccccatcaagctacccatgactttctccacagaattggaaaaaactactttaaagttcatatggaaccaaaaaagagcctgcattgccaagacaatcctaagcaaaaagaacaaagctggaggcatcatgccacctgacttcaaactatactgcaagactacagtaaccaaaacagcatggtactggtaccaaaacagagatatagaccaatggaacagaacagagccctcagaaataataccacacatctacaactatctgatctttgacacatctgacaaaaacaagaaatggagaaaggattccctatttaataaatgatgctgggaaaactggctagccatatgtagaaagctgaaactggatcccttccttacaccttatacaaaaattaattcaagctggattaaagaattaaattttagacttaaaatcataaaaaccctagaagaaaacctaggcaataccattcaggacataggcatgggcaaggacttcatgactaaaacaccaaaagcaatggcaacaaaagccaaaattgacaaatgggatctaattaaactaaagagcttctgcacagcaaaagaaactaccatcagagtgaacaggcaacctacagaatgggagaacatttttgaaatctacccatctgacaaagggctaatatccagaatctacaaagaacttaaacaaatttacaagaaaaaaatcaaacaaccccatggaaaagtgggcgaaggacatgaacagacacttctgaaaagaagacatttatgcagccaacagacacatgaaaaaatgctcatcatcactggccatcagagaaatgcaagtcaaaaccacaatgagataccatctcacaccagttagaatggtgatcattaaaaagtcaggaaacaacaggtgctggagaggatgtggagaaacaggaacacttttacactgttggtgggactataaactagttcaaccattgtggaagacagtgtggcgattcctcaaggatctagaactagaaataccatttaacccagccatcccattactgggtatatacccaaaggattataaatcatgctgctataaagacacatgcacatgtatgtttattgcagcactattcacaatagcaaagacttggaaccaacccaaatgtccatcaatgatagactggataaagaaaatatggcacatatacactatggaatactatgcagccataaaaaaggatgagttcatgtcctttgtagagacatggatgaagctggaaatcatcattctgagcaaaccatcgcaaggacagaaaaccaaacaccatgtattctcactcataggtgggaattgaacaatgagaacacttggacacaggatggggaacatcacacactggggcctgtcatggggtgaggggaggcgggagggatagcattaggagatatacctaatgtaaatgatgagttaatgggtgcagcacaccaacatgacacatgtatgcatatgtaacaaaactgcatgttgtgcacatgtaccctagaacttaaagtataaaaaaaaaagagtgtgggataatggaggaaggaccataaagttggatcaggctgaactcattcctatgggtccactaaacagagattctgcatttaatgttgcagctcagggagttaaaaaagggttctaatagtttatttgcttggttagctgaaacatggatcgaaagatggcccactgtgagtgagctggaaatgcctgatctcccttggtttaatgtagaggaaggatcccaaggcttagagagattggaatgttagagtggatttggatttgtcagtaaggacctactcatcccaactgggagggtccagaagacacacctttcaccagttccttgtgaaatagatttgtgaagggagcaccagcatccttgaagagctctttgattgctcttctctgtatgtcagatcttacagtgggaaccacagccactcaactggaaaacttaaatgcaatgggaataattggatcctgaggtggcagaggccaagtggcagcactcaaccatcaaaggcaaggtgggcatggttagtaatggacagcagaagcaaaacagcaatcagaatagtctgaaacctatagagctctagcattggctaatttatcattgtattcctagaagtgaaatcgacaggaagcctactacattcttacttgatctgtataagcagaaaacttccaggtcaggtgaacaaaagtccaatttgaattataaaaacagagaatcatggtccttcaatcaatttccagactcaagctagtttatagacccagaaccccttgaatgaaagggaggccaggtccacttgaggaaggaccccactatactgctgaaaatttatactgttaatctttctcctaaccttcctcaaggaaacctctggccttttagcagggtaactgtgctctgaagaaataaataatcagggttttggggggctactggatactggttctgaactgtcattgattttaggggagccaaaatatcactgtggggctgggcatggtggctcacacttgtaatcccagtactttgggaggccgaggtaggcggatcacttgagttcaggagatcaagacctgcctgaccaaaatggtgaaaccccatctctactaaaaacacaaaaaattagctgggcctagtggcatgcacctgtagttccagctacttgggagggtgaggcaggagaatcacttgaatccgggaggtggaggttgcagtcagctgagattgtaccactgcactccagcctgggcgacaaacaagattccatctcaaaaaaaaaaaaaaaaaaatcattgtggccctccaattagactaggggcttataggtgtcagataattgatggagttttatctcaggtctgacttatagcgagtccagtgagtccctggatccatcctgtggtcatttctccagtgctagaatgcgtaattggaatagatattcttagtagctggcagaattcccaaattggttccctggcctgtgggatgagggctattacagtgggaaaggccaaatggaagccattaagaatgcctctacctaggaaaatagttaattaaggacttgaaacacggagggtggtgattcccaccacatccccattcaggtctcctatttggcctgtgcagaagatgtggatcttggagaatgacagtggattatcattagcttaaccaagtggcgactccaattgcagctgttatagtaaatgtggtttcattgcttgagcaaattaacacatcctctggtgcctggtatgcaactattgatctggcaaatgcccttttctccattgctgcccataaggcccaccagaagcaatttgccttcactgtcctacctcaggggtatattgacattccagctgtatgtcataatcttgttcacagaggccttgattgcttttcccttctacaagatatcacaccagttcattatattgctgacattatgctgattggacctagtgagtgagaagtagcaaccactctggccttatttggtgatacatttgcatatcgggggtgagaaataaatctgactaaaattcaggggccttctgcctcagtgaaatttctaggactccagtggtgtggggcctgttgagatattccttctaaggtgaaggataaattgttgcatctcgcctctcctacaactatgaaagaggtgcaacaacctagtgagcttatttgtattttcaaggcaacacattcctcatttgggcgtgttactctggcccatttattgagtgacacaaaaggctgctagttttgagtggaactactacctaatgataggccgattacattgaactacttccatcgtggaaggggcagcagtttatccttgggacagacagttatttccgatatggatttgactttcctgcatgcaattcttctaccaagactgccatctttgggctcacagaatgccttatccactgccatggtattccacacagcattgcttctgatgaaggaactcacttcccagccaaagaattgcagcagtgggctcatgctcatggaattcactggtcttaccgtattccctatcatcctgaagcagctggcttgatagaatggcggaatggccttttgaagttgcagttacaatgccaactaggtgacaatactttataggactgaagtcttctccagaaggctgtatatgctctgaatcagtgtctagtatatggtactgtttctcccatagccaggattcacagatccaggaatcaaggagtggaagtggaagtggcaccactcaccatcacccctagtgacccactagcaaaatgtttgcttcttgttccagtgacattatgttctgctgcctagagttcttagttccagagggagaaatgctgccaccaggagacataatacaaaagtggcttgaggagctactttaggcaactcaagcttcggagtcaacaggttaggaagtgagttacagtgttgcctggggcgatttacccagactgtcaagatgaaatcagactactactccacaatggaggaaaggaagaatgtctgcagtttaggagatcctttaggatgtctcttagtatcaccctgccctgtaattaaggtcaatgggaaactacagcaactcaatccaggcaggactacaaatggcctagacttcagaaatgaaggtttgggtcacgccactaggtaaaaaagccacaaccagctgaggtgcttccagatagcaaagggaatacagaatgggtagtagaagaaggtagttatggttagggaaaagctgccccagggaccaccgcccccccccgccacccccccccccccgcccgccctgcaatgcagctgacccttaccctgaatactctgcagctgcattcctaaacccttatctaggcgccacagcaaggtcaccagacttgctgagcaaaccctgattatagccccccgggcggcactggagaggtcaggagaaacctaggttacaccctcttgtaaattcctattttcacaagataatatactgtaagccggtcaagagatgatatgtggtaaagttaactgacaaacaatcccagagtctctctcccccatagaaacccctcattttgtaagctcagggctgcctcctgactgtggtggaacagcccggcaggttaataaacttccttgcctgaccttgggtctctctctctctctctcgtcctttctttcggctaactttacagttatcaataccagctgccactacatgacccatttcagaaacgaggactgtaattgtcatgagtattctctccttattttgttaataatacatttgtgcatatatacacttgtattaagcagatatctttgtcttttcttgttcctttatgatgtaacataagatttactgacgtcacatcagcatttaagtgttgttaattttatgtaatagtatttaagttaaggattagtgcattttcaattgtacaaaggatagttacattatgttgggtggaattatgaccttgttattgtctttatttggagataagtatgatttaagaaggtgtgtgtgagtgccaagttgacaaggggtggacttgttatggttaatagagatgtcaacctgattgaattgagggatgcctacatgactggggaagcattgtttctggttgtgtctgtgaaggtgttgccagaggagattgacatttcagttgttggactgggactcagtgtgggtgggcaccatccaatcagctgccaacagaggctggaacgaagcaggcagaagaagggggacaaagcagcttgctgagtctccttgctctctctcttcatgtgctggatgcttgcttactctcctcctatccttggacatcagactccaggttcttcagcctttgaagtctgggaaccccaccagtggctcctgggggctcttgggccttcagcctcagactaagggctgcattattggcttccctgcttttgaggcttttggacttggactgagccacactcccagcttctgtctttttccagcttgcagatggcttattgtgggacctccccttgctatcatgtgagccaattctccctgataaactcgcttttatatatacacatatcctattggctctatccctctggagaactcctaatacaggttcagaattgaatgtgaatttagattgagaaaataaatcacaacaatttattggattcttggaaattctggtccctttcttctgatctctctttaggcaaattatcacacatgcttacacagaatacctccagattgcagcctggctcccctgaccccatctagaattctccacaaccccaacaacagctgcccaggctcagggaagccttgaagctctgacctcactgcctttgacctcccctctctttctgcctccttactactcttgtttgtaccatgccagtgcccactgtacagcttttccacttgctccttcctgtgcttgaaatgttccatccccagctgtccacagagctcaccttctcatcttcaggtgtctgctcaaatgtcacctcatcaaagcaacctaccctgttctctctgtaaaaagcagcaacccccttctgcactttctattctctttaccgtgctttaattactctcataacactaccagctgacatattctgtgtttgcacatttgtttgttaattgccagtctccctcctttagaatggaaattcaggaggatagggaccgttttgtctcctgtaagtatacctggcacctaaaactaggcctggcccttgataagacacttaaaaactattggttgaatgaatgaatataagttgaataacaaggaagccttattatttttcaatatggaatcaactttttaaggaaataattcactccacattcccagcccatatcctcaattatcagttacctcagttacctactggtgtgtgacagctactattttggctacctggcatgcttccacatcattcttaccctaatcccacactccacttatccccagggataagcacacactctaggtatggccaagtggtgtgctccagatgattagtcagaaatgagctcaccacctaagcttggccaatccatgacttcctcaagatcattctcactggagttagggaagaggaagtagccccttgacatgtgtcacattattgagctagaaggctgtgaattaagggctctgagggatgtgtttttccctagcagagaaagagatggcttgaaagtcccagcagcatggagccctgggtccagtttctggagctcctctgcttcctgcagctcttcctgcagttccaggatgctggaacctaggagtttcccagcatccttccaacttccttttctgctttaacaaataccagctgagctcctgttactcatgattaaaactcctcactaatatgcaccgggcaccaggctgttcactgaggatgtagtgatgacctggacactatccttgccctcaaggaacttacaaccttcacggagaaagcagaagggaagatggtaatggcaatgcagtctgaacacatgtattggacacgggacttgccggaattcagagatctgacatgtgtcatgacactgatcagctgctttaagttcttgtgataattctaggttcaaagcaacctaaggctctaaaataatattgttggtcatcaaatcaatatatatattaactgagcacctactgtatgcaagggttaccataagtgctatgatacagacctgtagaacattctaactggggtaggttgcccttctaaaaaataataaatactaggtaagtatgaaatgaagtcataggacattctatttcttcctgtgtctttctttttttaattctttttttttttttgagatggggtcttgctctatcaccccagctggtgtgcagaggcatggtcatagcacattgcagcctccaactcctggactcaagcgatcctcctgcctcagcctctcaagtagctgagactacaggtgtgcaccaccatgcccagctaatttttttaagtagtgatgaggtcttgctatgttgcccaggctggtgttgaaatcctgggctccagccatcctcccacctcagcctcccaaaatgctgggattacagacatgagtgagtcactgtgcctggccctatctgtggctttctaaaggagcagtttagcatatggttgggagtgtgagctttggaatcccaattgtgttactagccaggtgatcttgggcaaagtcactttatctctgtgagactcagtgtcttcctgtagactggataatataactatttattttacagggttgttaggaagattaaatgagtccatttgagtaaagcagttagaatagtgcccaacacatagtaaatcctcaataaatgttagctaacaacactatgtctaaatcatataaattataaattcctcaaaagcaggagccttgcattatttgtagctctgctaacacgtacagaccactcaagatttttctagttgctcagctcagcagtattaatatattagcagatgtagcattgtcttgcttgctggtttctccatctgctctaaatttagtactaaataaagatagttgtgggggtggaggaggttttaaagatctctggtccaaatccattaggttttttgttgtgtttgaaagctgtaatccagagagagtttgaaagcatatgctaaagaccatttttaggcatgttttgcagaaatgtatagcatctatttacattattatgtgtttccatactttgactgtcaatcctttgcatatagtagtatcctaactgatgttccaaatttgctactatgctatacatgggcttgcataattcctaattcataacatatggatattaaatagattagcttatgagaagcaattcacttttttccatcttggtaagtagaatagtcacaatccaataaagataaataaagatgtctaggactaaggcatcataattacaccttatatttgtatagtgcaaaataacaccttacatttgtatacgttatttaattcttacaactactcagtgaagtaagcaggcatggaagtatcatgaattccattttatagatgaagatattagaacctagaggttttaactgacttgcctaagtttactacatggtaacaaatggcagagccaagatcatacttgggtttcttcactgctagcccagtgccctttttactttactggtagaggaaagtgttaggaatttttattttcttccaccaatatttacagcctgactctacaaagaaccttaccaatggtggtctgttgtgagccttcagcaaggtatgggtctcatatgcttaatcccaatttgtaaatgttatagagccacccccctggcaaggaggatttatatcaggcaaatgttgcagaaaacgatatttagctgcatctgctacagctgataaactttggaattgaaagacaagaaagaatcatcaatgaagtaactcaaataatgggagagaatctcccagtcaacactgaatatccttgctccttaaatttcaagctaaagatgcctataaaactccatataatataaccacagaagatattttgtaggtagtactttgcacaaaagcaatcataggagttttacagtttgtttttattggaagagagccacagctccagaatttcttgtcattgaatagatgggagggagcgggagttagaagcagaaaagagaatcagcctgaacatacagatgctggggactatgcggttggggcagaaaacgtttatactgtaaggagttagtgtgagtggtggagagagagtgactaaaatttttacacaattactatataaattctttttttttagtatatacattctgatcagactagtgtaaactggcatagacaaatatgaagcagttgatgttgtacatagaaatgggagaaaagaaagccagacaatgtaaaaaatttattcccctcccactccagataacaccccagtgtgagagttaggagtccatatatttcaagagactgaaaccaattcaatgagcttgaaaaataataagatgtattgattctcataggtcaaaaaaacagggatggtaccagcatcaaatgcaattggatctgaggctcaaaggagagtagggttttccctctctctccttctggatttctactccgttttcttgtttattatcttctttcctactgcaaatgaccttcctcgatgtagtcagagaagttgactgccagcagtggcaggccaatactccatgctggggtaccactgtcaaaccaaatcccagcacaaagaaagaaaatgtttctctgatggcttccatgtatgatgtcttagagaaggattgtgattggtcagtgtgggccacatgtctgcccgtgaaccagtctcaagctctagggcaatggagtgccaggactggccaatccttggttatgtctccacacttgtagccaaagcagatgaagtctgtcaccagaaaagtggtaaagaattcggctgagctatcccagttcactacagcaacagttcccaaattgacctgaagataaacatcccctggacccttgttaaaaaacaattatttggctcccagcttagacctccataataagaatttatataggagaaggatggtaatttgtatatttagcaagtaccgcaggtgtattagtttcctattgccactgtaacaaattaccacaaattcagtggcttaaaacaacatggatttattatggtcctggaggtcagaaacccaaaattggtttcactaggctaaagtcaaggtgttgacaggaggtttcttctggaggctctgaggggagaatccatttctttgcctttttcagcttctggtggctggctgtgtcctggtccaccatctttgaagagcatcactccagttactgcttctataatcacatcaccttctcctcaaactttgactccttctgtgctccttttataagaaccactggacattgggtccacttggataatccagcattatctccaagttcaagatcctaactcagtcacatctgcaaactcccttttgccatatgctatatggttgggacgtgtccctcaaatttcatgtgttgaaaactaaatccccaaattcatatcttgatgctatttggaggcagagatttggggaggtaattagtactagatgacgtcatcaggatggggctcctatgatgggactggtggctttataagaggaagagagacttgagtttgcatgcctgtggtcttttgccatgtgatgcccttcaccatgaaaaccctcatcagaagttgagcagatgccagtgccgtgctcttggactttccagactccagaagtgtgagaaataaatttcttttatttataaattacccagcctcaggtattctgttatagcaacagaaaacagtcaaaaacactattcaaggtaacattcacatgttccaaggtttattaggacatggacatagtggggccattatttagcctactgcaccaggtagttatttttttttgagacagagttttgctcttgttgcccaggctggagtgcagtggcgcaatcttggctcaccacaacctctgcctcctgggttcaagtgattctcctgcctcagccttccgagtagctgggattacaggcatgtgccaccatgcctggctggttttgtatttttagtagagatggggtttctccatgttggtcaggctggtctcgaactcccgacctcaggtgatccacccacctcggcctcccaaagtgctgggattacaggcgttagccactgcgcccggcctgcaccaggtaattattatcaggtaaatttgagaaacactgataaaggagttaaaaagaaattacttaggcagattgtgaaggtaagaaagtccttggtaaggtttttcttttaatgaaaagcagcccccaaatcatttcttttctaacaaagagcagcctgtaaaatcgagctgcaggcatagacaagcaagctggaagcttgcatgggtgaatgctggcagttgtgccaataggaaaaggctacctgggactaggcatgattaaaatggtagctccatatttccttctctttgctagccatgtgtacagtaagaagcagacaagatggcactggccaagtggacagcccatttgcataataagattggggtggggcaaccagccgtctccttgtgccatgtgaacatcacacctggtcgaaccaatctgtggggccttcataaatcagacaccacctcttcaagcctgcctataaaatctgctgcagtctgctgcaggccagcttttccccttcagacaatgcctctctctctcacaaaagagagctgctctcctttctctttgttttggctattaaacctctgcttccaaattcactccttgtgtgtccgtgtccttaatcttctcagcacgagacaatgaaccccaggtgtttaccccagacagtgatgctgcttcagcaccacaggaatggttagttaacaccacaagtgcaacataaatattccaaactataaatattatataagcataactaatcacttaactgcatataatatatagatgccccaattgggtggcccaaccaccatgtttttgaatgtgtcagtaactcatttcatttttattgttgagtagtgtttcattgctatggttttgaatgtctccccaaaactcatgttgaaatttaattgtcattgtgatggcattaagaggtaatgttatgttgaagcacaaaggccatcaccagatgctgctgctatactcttagtctccccagcatccagaaccgtgaaccaaataaatttctattgtttataaagtgcccagtctcaggtattccgctatagcaacgcagaatggactaaaacatccactgaatgaatttaccacaatctgttcatccattcacctatgaatggacatttggattgtttccagttttttccgggccaggtgtggtggctcacacctgtaatcccagcactgtgggaggctgaggcaggtggatcacttgaggtcaggagtttgagaccagcctggacaacatggtgaaaccccatctctactaaaaatacaaaaaattagctggatgtgctcacttgaacccaggaggcagaggctgcaataagccaagatcgtgccactgtactccagcctgggtgatagagcctctgtctcaccaaaaaaaaaaaaaaaaagaatatttatggagcctcttccacatgtattttctctcccatctcacctcctacttcactcctctcttatcctgccctaactgtgttgaccttacttctgtcatgtgaatacactgagcttagttctgcttcaggatcttaacatcagctctctccagatttttgcatagctctctccatcattcaggtccctactcaaatgtcaccctctcagagaacctctcctgattgccctatctaaaatagtactccacctcctcccccaatctaattctctatggtcttttttttttttaataaaattgcaattatcactttaatattatattatctgtttggccacatgttaatcatatgtatcacccactagaatgtaagtttgtttttttttcatttctaacttttaagttcctgggtacatgcgcagcatgtggaggtttgttacataggtaaacatgtgccatggtgatttgctgcacagatcatcccgtcacccaggtattaagcccagcatccattagctgttcttcctgatcctctccctcctctcatcccgtctcatctgacaggccccagtgcgtgtggttccatgtatccatgtgttctcatcatttatctcccacttataagtgagaacatgcagtatttaattttctgttcctgcatctgtttgctaaggataatggcctccagttccatccacgtccctgcaaaggacattatcttgttcattcttatgacagcatagaattccatggtgtatatataccacattttctttatccagtctattactgatgggcatttaggttgattccatgtctttgctattgtgaataatgcaccaacaaacatatgcatgtatgtgtctttataaagaatgtatttaataagttcgggcacagtggctcacgcctgtaatcccagcactttgggaggccaaggtgggtggatcacaaggtcaggagattgagaccatcctggccaacatggtgaaaccctgtctctactaaaaatacaaaaattagctgggcgttgtggcacgtgcctgtaatcccagctacttgggaggctgaggcaggagaatcgcttgaaccagggagtcagaggttgcagtgagctgagatcgcgccactgcagtccacccttgtgacagagcaagactttgtctcaaaaaaaaaaaaaaaaaaaaaaaaagaatgtatttaataagttctttaaggaccaggaaatttgtctcacgctgtatctccatctagagcagtgcctggcaaagagtagaaattcaataaatttttgttggatgagaattttcatttaaatcttaggaaaagaaaaatttgaacaagtgttatacctacttttatagccgaagcaactgaaggtgagacaggttcagtaacttgccaggagggcacagagatagagccaggatttgaatgcttgtccatttgacttcaaagctcatccattgtcttagcctctatctaccgtctcataatgaagtggaatgtatacacacaagactacaaaatcaagtgccagtggagtgccttgaggttgtttggatgagatcaacggaggagatggagtcatcagtaggaggggagttggcctcatgcatgagatttgtaaagatggaggcaggagacagggcaaaccttgggcctgggtctgcgattgtccaccgtggctttgtccttggctgaagaagccagttcccatcttctcctgggagagcagtgaggatggagggccagctgtagggtcaggactgtgtaagccgcattcctgggcctttgtttcaaacctaccaacaaagaacactctctggggagcttttgtggactgtggttaggcctgcagtcaggacccgcattctaactaaccagtgtagcctctggcaagtgcagagccactttgcagctccctggcaatggagatgatctgtgtactggggaaggcagctgggcccagaggggcttttgaaccacagcatttttcttaaagatgggggatgttattgttgaaccaggtaggaggtgacctgggaaccagcctccctgaaaaggaggagggagggaaacacctatgcccagggttatgtggtgctatttccttcctgattaaagatgtagatgccttggtacccgagccctggaggaggctccctcaacctgagaaagcactgtgctgcagctcatcctgggagccggctcccctgggtggtacagcacagagggaaggaagggggccgcagttcaagggcagcagctgggagaagcatgtcagaagtgccagggaagcaaaagtcggctagggaaaggaaaggggaggaaggaaaagcagagaggcagcagcagctctgggagaaagggacagcagacattagaggggcgagtgttctgggagcctcagagcagtgatggattttccatctttccttggaggaggggctgggtcttggaatcccctcccttctctgccccttacacacagtttgtcctgaggagcagacatgaggtctgtgctcacccaagcgctcacagtctccttctctcttcaatacccatctgctgggcctaattcttacctcaaaaaggtaactcttgattattcttaaaagtttaaaaaaaaatagtaactgtgattctggtctaagctaaaattatttttcctcaaggttgtctcccaagaaaaatgcttaaagaggccgggcacggtggctcatgcctgtaatcccagcactttgggaggccgaggtgggcggatcacctgaggtcaggagttcaagaccagcctggccaacacggtgaaaccccatctctactaaaaaatacaaaaattagccaggtgtggtggtgagcacctgtaatcccaagtactcaagaggctgagggaggagaattgcttgaacttgggaggtggaggttgcaatgagccgagatcatgtcattgcactccagcctgagtgacagagtgagactccctctcaaaaaaaaataaataaataaataagaaaaatgcttaaagaatatggaaataatttggtggtgtttaggtagattgttttcctcctcagagttgaaagtaacacagatattcattaacttttatcactgaaatgacaccatagcactgtagcccaggctggagtgcaatggtgcaatctcagctcagtgcaacctccacctccctggctcgagcgcttctcctgcctccaccttctgagtagctgggattacaggcacataccaccatgcctggctaatttttgtattttagcagagacgaggttttgccatgttggccaggccagtctcaaactcttgacctcaaatggtttgcctcggcctcccaaagtactgggattacaggcgtgagccaccgtgcctggcaggtttgttttggatgaacttgtcatttccagcactccctgcttgtgatgttctctcttgtacctgtgacactgaggaaaaccgttagatgccaagttcacctgagggactaaaatctgtctagatgtaagtctgatctggcgtctactgggggaagggaaagactggataaactgtgtttcagttcatatccattgccattcaattctgcattctaagatatggcaaccagtaggctcactctacatgtttattcaacggaaacgatgtccgaaaatttaactttcatcacaaagcattttaggtgggtagaatcatgactgtgaactgtctcctaaataatttagtgttccattattcccctccccagtacattttagatttaggtcctacacagttctagaccctggattctagggctttgcctctggaaccagcggtattggcctcactttgagagcttattagaaatgaagagtctccagcccaccctcaaatccaaggaatcaggatttactttttaacatgctccccaagtgatctgtgtgcatgttaaagtaggagaaatgctgctctgaggcatctgatcagcaggccctcccaggccctggcttcagggtagagctatttgggttgcagatagcaccatgccacactctgtgggcagagagttcaaattccagctctgctgtgaacctcatcacagggacaagtgacctaaaattaaaaaaaaaaaaaatcaaactcacagaaaagtcgcaagaatagtacaaagggccgggcatggtggctcatgcctgtaatcccaacactttgggaggccgagatgggtggatcacgaggtcaggagttcaagaccagcctggccaacatggtgaaaccctgtctctactcaaaataaaaaaaattagctgggcgtggcggcacacacctgtaatcccagctacttgggagactgaggcaggacaatggcttgaacccgggaggcggaggttgtggtgagccgagatcgtgccactgcactccagcctgggtgacagaccgagactccatctcaaaaaaaaaaaaaaaaaaaagaatagtacaaagaacttctgtaaatactttacctagactcaccaactattaacattttgcagtgtatactttatcatttttttcgctctacctatgtatgatgattattcctgaattcttggagagttaattgcatatactggcatgtctttaccctcaatacttcagtgtgtagctctgaaaacaaggacattttcctacataacgacaacaccagggctagaactagatggaggctaacaaggcctgagcgtgagtggcccttcaagagggcttccttcaactttgtaccctaggagcctctgttgtctcgccctagttctggcctgcatgctacagttatcaaaatcaggaaaccttactattatctaatctatagtctattatatctaatctataatctattatatacctatagtctaatctataagctattttccaatcatgtctattgtcccaataaggtccttcgtagcaaaaattttccccagattcaattcaggatcatgtatgacatttacttgtcctgtgtatttagtctcctttgatctggaacagtttttcaggctttgtcttttatgatattgacatttttgaaaattatagactagttatgttacagaatgtccctcaatatggggacaagtaactttttaatctcttaacggttcagtttcatcacttgtaaattgggaatagtccctccttcatgttgaatcaaatagatgaagacacgtaatgggcttgacacatggcaggcgcaggtggattaaacaagaagctgccactgatcaggcacttgtcagcgccatgccaagtgcttcaagtgcattgtctcatttcgtttttactgcagctctgtgagatgggctgtatttttacccctacttcacagaagaagaatctgagacttagaatcatttgtccaaggtctcatagctagtaaggagtgacatggggacttgaatcaagtcagtgagactgcaaagattattcgcttagtaacatgcttgtggtgcttgctaaaatctagctttttaaacataaaattttcctagagttcaccattttaaccatttcaaagtgtacattcagtgtctcttagtatatttacaatgttgtacaactctcagcactatccgattccacaacatttccatcacctcatgaagaaaccctgtacctcccaattcccctgacaaccaccgatctgttaatctacctctgtttctgtggctttgcatatacataaaatgaaatactactaagcaataaaaaggaactaactactgatacacagtaacattctggatctcaaaaacaacatactgagtgaaagaacccaaatacaaaagactgcacatggaaatattccatttatgtgaaattctagaaaaaatgccttaggaacagacagcatggcagtggttgcctggggacaggaacatatggttgggaggtggcactgactgcaaaggggcataagggaactttttggagggatagaggtgttctaatacttgattggtagtggtggttacacattgcatatatttgcccaaatgcatcaaattgtccactgcgtcgagtttataatatgtaaattatacctcaataagattttaaaaaaagaagaaaaaatcccaagcatatctggtcctgaatggagttcaattcatcagcacagctaccttcgttgtctggccccagatccatcttcccagcctcatctctcgcttctctgacacttgccatgggcaagcccagtgttgggcactcagagaacgtgggggaaggagaacctctatcttcagggaactcacagcctagtctgggagcagaaagaaagggcagccaactctgacacagcagggcaccattcctagaggaccactgagtcctaaaggacaggaacaagaatattccagacacagcctggattccagtcattttgaatctcaagtttgaatccagtttcaatctaatattttgaataggtaatacatttctatggctgtatactttaagccaaagagatgacagagtttattttattgcttttaggaatgtgggaatcacttgtaatatttaggttaattgatgtcaagtaattttcaggagcaactggaattattttaaaaatcactggattaaactgggtgcagtggtgcatgtctgtagtccccagctactcagaaggctgaggcaggaggatcacttgaacgcaggagtctgagtccagccaaggcaacacagcaagactccatctctaaaaaacaaaaccaaaccaaacccaaaacattgggttgacactaaaatatcatgatgctaacttgtgccaggaggtcctttacttgagggaagagcactctgtctccatccctaggatgaaaagattaaacttctatattctcctcacccttagaaagctcctattcataggaggtaaaaccattaaataaaacaaaaggaaaataaacctttcaagtctttgcctgcgcctatcagagatctatgtggaactggcagtagcttggctccctttgagtgctttggaactatggtcttcaagatttcttgcttgcttttctcctaaaagaaatttgaaaaactgtgtttttttcttccttcctttctttcctttttctttctttctctctccttccttccgtccttttttttaaaataagagatagggtctcattctgtcacttaggctagagtgcagtggcatgatcacggcccactgcagcctcaaactcctgggctcaagcaatcctctcacctcagcctcctgagtggctgggattacaggcatgagccatcacgcctggctaaaactgtttcttcttgaacttttaaaggtcatatctaaaatgtttcatcacaagtttaaataatagtaaggtttgttatttctggcgtaagtattggcattttaaaataagattgttacatcattctttaaacgtatccaaggaaatttaaagatcataatgcatctatcaaccatttaaaaaatatatgaacaagcttttctttaaagtaaattttacatcactttttttttcttatcttgtatttccattccacttacccctcaatattttaatataatattttaagctggagagtcttttattgatcaacctatcatatttccctacaaaaaaatttttttaaaaaaattcttgactgagtctgataagcttaaaaagctcattttgattgtataattttaatatctaattgatctaaacaacataaaatattacatattttggtatctattaaaattaaaggatatttttgctgaatgaaatagaattgggtcaaacctaatcctagttttcacttctatggatagaagcacaaacaccttgttcattcattcaacaaatatttattgagcacctcctacgtgtcaatagctactctaggcacttgggatacactggtaaacactacagataaatccttgccctcatggagcttacattctagcggggggtaataggcaataaacaataaacacaacacataagtaaatcatatagtatgtcagaagtgctatagtaaaacagaaagcagggtaaaggggctttgggtgtactgtgagagttaagaatgggctgtgatttttaaaaggtcaagataggcttcaatgaggtaacttttgaccaaaggaggtgagagagttggcaatgcagatatctgggggaaacatgtacaaggcagagggcacagccagtgcagaggccctaacttgggagcatggctggcatcttctagggacaagaaaagaggtcgggaaggttaggacatattggagaatgactgataggaaatgagattagagaagtaatgctcagggtggagtggtgatgctgatcttatagaaccctttagactattgtaaggatgtagatttttactctaaatgaaatgaggatcatttaatgcagggatttaagcagagtgcagatgtctgacttttttttttttttttttgagacggagtcttgctctgtcacccaggctggagtgcagtggcgcgatctccactcactgtaagctccgcctcctgggttcacgccattttcctgcctcagcctcccgagtagctgggactacaggcgcccgccaccacgcccggctaatttttttgtaatttttagtagagacagggtttcaccgggttagccaggatggtctcaatctcctgacctcgtgatctgcccgccttggcctcccaaagtgctgggattataggcgtgagccactgtgcctggccctgacttctattttaaaaggatctctctagctattatgttgggaagaggcaagcatgagaacagggagagcttttagaagatgaatccaaagatgagatgatggtggctcagaccagggagcagcagtggaggtggttagggatgctctgtggattagacatgggtgtgagaaaacgaggggaatccagaattgctggacagcactaaggatttacttgaggttcatggtgatgaaattaaagtgaaactgctcagggtttttggtctgaacaacttgaacaatagagttatcaaatgagattggaaagctagtgggttcaacaggtttgagggagaatattgctcagtttgtgacatgtttgaggatatcagaatctggagttcaggtaagagatccgagctggagatataaatttaagagttgtcatcatatatgatgatattatatatcttagatggtactgaaagtcaggagactggatgagatcacggaaatgagtatagattaaaaagagttcaagggaccaggtgcagtggctcatgcctgtaatcccagccctttgggaggctgacgcaggcagatcacttgaggtcaggagttcaagaccagcctggccagcaaggcgaaaccctgtctacggaaaaatacaaaaactagccaggtgtggtggcgggcgcctgtaatcccagctacctgggaggctgaggcagggagaattgcttgaatctgggaggcagaggttgcagtgagccgagatcatgccactgcactccagcctgggtgacagagagagactctgtctcaaaaaaataaagagttcagggaataagccccagttaaggggtctgagagaagagatggaacccagcaaagaagacagggaaggaggaaccacgaatgaaggaggaaaaccaagaggatgtggttaaaaaaagagaatcaagtgatgagctgtgtcagctgttacagataagatgagaaccgagactagatcattgggtttagccaatgtgaagttccttgttggccttcacaagagtggttttgatacggtagtaaggatgaaagcatgaatggagtttaagagaggatgggaaacctaacactcagctgatgacctaaaatacgccacatgtgtacctcgcatgtaatgattctactacatatgtatggagtcttaacatacgtatcatgcttgacatgtttttgaactttgtataaatggtattgtatgggatgtattctgctgttgcagaatgggagaagaactgcagacaaagtatagaaaactcttttagaagttttgttgtaaagggagtagagaaataggtgatagctgacagtagaaataggtcaaagagaagaatctgtaggattggaaaaatcacagctgcttgtaagcttatcagaatgacccagtagagaaatactgataaaacagaataggcggataattgctggagtgacagtgaggatcttgattaggcaagatagtactggaatctatgtcttggtgacaatactcctttagctaggagcacggcaattcaaccatgtgagggtggggaaggcaaagtagaggctggtatgtgggtgtgggtgatgctgagattctgtggaattttttctctcattgcttcaattttctaaacaaggctattaattgagaatgattgaggagaggacatgcaacttagaggacagagaacgtacaaaatccagaagattggaggcgggaagtagaattgctggacagcattaagggtctatctgaggttcatggtgatgaaattaaagtgaaggtagtcagtgtgattgtgttcttctctcgccacattcagatgcatgggtgccagcttgaatcagggttgtggctttgccaagcaagcacaacaaagggaaaaaaaggcaagggggctgagggcatgtgtaagagtgattgtgattggctgggggttgaggctgggtgacagcagatatgagggttcaagaattgttgcagttagagtactatagggagtgatctggaaaactgaggtagtgatcagggtgtgagatgtttgaaactgagataatgaagaagttgcagagtttgataaggctacggtgattatgaccatgggaggaagtggctgagttaggatatgtgcaagtttgaagttagagaaggtacaaaatctagaatgatcaaggggaggatgtgtaagttagaggacagagaaggtataaaatccagaagagtggatcagggaagtataagagaattgctgaacagcactaagggtctacctgaggttaatggtgaacagtgggagtctccagccaacagccaggaaggactgaggctatcagtcctgaggcctgcaaggaactgaatgctgccaacaaccacatgagcttggaagcagatccgctatcccagcctcactttgtagaggacccagctaagcaacgcctggactcctgacccagagaaactgtaagatcataaaattgaagcaatgaagaagatccttgagaagaagaaaaggaactgagaggccagggtactgggaagatcttataaccacctaccactaggacagaagtggcattggagtgaatgtcaggagcaaattgtgcagagatgaagcggggtgaggtcagcgatagaggtatcggacagcaagatttaaagctgccggtttagaggaggagggggatgacctggaagcaatgttgagaagcaagaaggaaacctatctcacctccaggcactaagaagctgaaggttgaaaacacagttgccggaagtagttctgtcctgtggggttcggcatcatgcaagttccccctgggctgttctctgatacagggcacttgctccacactctgggaacccagattaaccagtctgccctgtcacatagttgaaggagttgcatttatctttctggctcccaattcctttaaaattacatttgttgcagaacctccacaaggctaaataaaataaaattacatttgtgaccatcagagaactgaagaactattaactggctgttctggttttgctgagatcgggctgttgacagttcctggttgtcccacagctacccatgtcagttatctccactaacatttccaagaatctttgtaggacaatttctccacctgcaaggtctttcaagtaagaactcttctttcctttaaggcaattagcccattgccaaaaggttttactgtcttaaagctggaactatctgagatctaattccaaggacttttctacagctaagtgagatgcctcacaccagtattaggtgattcttcgtgaggacagaacagagcattttcatcttgtgtttaaagcaatttgttggcttcggctcctcaccactttctataccagtctcccattcacgtccctagtaatgcctatgccaaaaaaaaagaaaaaaaagaaaaagctgacggtgaaacctacaggtttaagggcttaaatctcaacctttgtgttaggagtaacaggagtgtgctgagagggcaagcaataaaacaagtcataccaaaaggccacattggtctctcctaagccccaatcccactccactcctgtggccagtagtccaaacagaaaataactggagaagacgaggaggtcaaggatcaggaaactaaacgttatgtgaattcaccagcaagatgtacagaacgcttgcgtttacattgtttttatggaactagcagaataaaactgatctattttaaaaatgaaaaaaaaaaaaaaacaaaagaaagaaaacacagttgccactacttgagaggtggaaggaggagcagtgtcccagggcaaagttgggtttccttaagtaaaaaggtgaagggaacctgaagggaaattctgagaagaggttgagcttacagggaatatcatttgcataaataaatacatggtgtggtagactctaaagaggccccatatgattcccacctcctggtgttcaagcttttgtgtgtttccttccccttcaatgtaggtggcgcctgtgatttgcttctggccagcaatgtatggcaaaggtgacagagtatgagtgatactgtgtatgtgatgatgttacataagattgaaaccagtgtcttgctgagactcttcccgttgctggcttcgaagaggcaagctgccatattgttagcttccctatggagagcaccacatggcaaggaacagagggggtctccagccaacagcctgcaaaggactaaggccctcagtcctgtagcctgcaaggaactgaatggtgccaacaaccacatgaacttggaagcagatcctttgttccagcctcactttgtagaggacccagctaagccatgcctggaatcctgactcagagaatctgtaagatcataaatgtttgttgttttaggcttctatatttgtggtgagattgttatacagcaataggtaactaatacagacggaatagaagaagtttagttataacaatgtctcaatttcttaaaaacttcttctgaggtatattacctaagattcacatattgatctgttaccaaatcatgttttgtaatctatcagctgacagatcttccttcagttttgttgacagaaaagatttgaaaactatctgacttgaaaaataatttaatatccattcactaaggtcatttactttctcagcatagataccgatttttgaattgtcccttttggattgctggggaggttctgcattgatcccatgcaccttagtagtgggtgagaattttgactttcttctgtaaggtgggaggacagttttgaaaggggatgctgtgtcctcagctcctttctcaagctgggcaagtttagaaaatagaatatatagcaatggaagatgtggaaatgaattcccttaaaactggtctccataaaccccaggggtaagagaacaccagtttggagctttaggggctttctggtcaaagagggaatggcccaggcggtgatgtggaggatagaatgaagcactgagtatgagtggcgaaggcgtacggtgggtgtagagattttctgggcgacgtgacctaagaaatgactttagaactggctaatcattggttttggagggactaaaagtagttcctggttggtgaaaataaatcattaatgcgttttaaatgaaaaagaaatgcatgcgtcttgtaaaaaatgtgaaataaaagaggcataaagtcaaaagcagagcctatgccttcccccaccaaacaaacaggtaacctagttaacaggtgtgtcgtaggattcgaagttcgcctccagctccgagagtgcgcctacatctcttccaacaaaatccactcacacttgcaacgcctggcaaggctcttcaatatgtgattccttgactgtcctgtgcgtctctcgagtgtaaacacctctggggctcgtgattcggggctgccagaaagagaaggaaggtgccgccagcgtctgtttcttcccgaagtgaactcctacaacctagccaccttctccccagagctgtcgactggctgttgaaggccaatttttgtgcctacgcaggtcctcaacacagaacaaaacaaaaaaacaacaaaggccgggctaatagctatttataaacacttactggacgcccactctacgccgagctctcccgcgctccttggatacttttttgcaacgagatgccaatttccccggcgaccactccctcaaacaggccttcgcctccgcccgcgctgaggcccaggcccaggtccagattcagagccgcccgccggctggcgctgccctgtaggcgcctgcgcagagcgaccctccccgtcactcggagcgggaggcgggggcagccgggagaaaggaaagctgcgggggaaaagggccaaaccctgaaattacccggatgtggtccccgcgcgcgcatgctcagtggcttctcgacaagttggcagcaacaacacggccctggtcgtcgtcgccgctgcggtaacggagcggtttgggtggcggagcctgcgttcgcgccttcccgctctcctcgggaggcccttcctgctctcccctaggctccgcggccgcccagggggtgggagcgggtgaggggagccaggcgcccagcgagagaggccccccgccgcagggcggcccgggagctcgaggcggtccggcccgcgcgggcagcggcgcggcgctgaggaggggcggcctggccgggacgcctcggggcgggggccgaggagctctccgggccgccggggaaagctacgggcccggtgcgtccgcggaccagcagcgcgggagagcggactcccctcgccaccgcccgagcccaggtaaccgcgccatgtcccctccccttcccccggccgggcccgcgcaccccgcctgtggcttccccgccccggggcgggctcccgacgacggcggcggcggcggcggcggctgggagcgcgcggaatcctctgggagggcgaccgcggcggcctgacgagccgggccgggcgggccggctgaatgccgggcggcggtgcctcgcgtccctcgggcccccagctccgcttgcagctcgtgggagaatcaagttaaactcggacgggactcctgccgcggccgccgctcctctttgttgttctcagtagtttcacggtcgccccggctgagcgcgttgggtcggctggaatgtgttgccttagggtctaagtgaaagttgtaaattgtttgtctaaatttattttctccagccaatttctgttttgtctttgtcccctactttctcttcctagtcttgtcatgccagtttacgcttctggctttgatatgtttactttttgagtactgagagtgacagcggtatgcaggacacattcttagcacctaactgaacccctccttgcccccaataaaacatgcttcctaataaaagacacagctgatcttactgttagcactgcatgtactgacagtgaaattggtgtagggtggagggcggtggctccatcacttgtcccaaactgctgttaggatttctcaaactagattttcaaagacacaagtgtgtttagttaacctgaaaggtttatttgctggtgcagaggctttaaaaagccctgttgaagattgatagctgtttcccttcaaaaacctaagtacgtttgtttttatttaaaaaaacacatttatttcccaattagtttcttaatgcatttagtttttgcaccgtagtttaaggtggaattgccagttatttaggaataataaacacaacaggataatagcggaattaccctgaattgactttctgcaaacatataatcttagctaatttttgttagtaacctttgacttttgccagaattagcatccttctagtcttagtagcagcttggttactcgggtgttttaagaagtaggttcactcctttttgctggcaaaaaccatttagtatcaaaaaaaaaaaaatgcgtaatttcgtaattagatttagaacaaggcatttgaataatttttatggtggatttcataaattacttttgccataccctgcagagactagataatatatatttcagttgaaatctaggaagttctaaaatgtaacttttttttaatgctaaggacttactctctctatattggaaagttctgatatgattagtacataatattccaaactgtaaaatgattaacatttaaaaatacggtttttaaaattagtgtttcttccataatgctgtcatgattttgtttacttaaatgggtttgttacagaacaaatgtaatagagatggaccaagcatttgtaattcggagtagctttaggtctaaagacgatggtgaattatgtaggtttaagttgttggaattaaaactaaaagcttcttttgataaaagtcgttataacattttgtgactctattaatagaagtggctttttctttgctttccaggtttttgggcgagttttaaagaagtattgcatcttcgttttttttatttttgaagtgggagtgtatgtttctgtttaggtcactgccttcattgtaaatcttgagtttagaaaaaaccaaactgcaaatctgtttttcagacttaatgaaaatttgtgccgagaaagtcactttgaaatattttggaataagttttacatgaatgattgatcttttatgatagctttgctgtttgaagcaattctccctctactaggaagcagcaaatcttacttttaaaaacctctgcttcactttcttaagctacattttagtcgagcgattgtgtgtgaattctttttctgtattccccttcagtttttctttctccccgcaaattaaggagcgagaattaacctaatttatgctgcccagtcacactccagctctcccacttggaagcagtttttttctgattgagccagtgttatagtaacatcattagacactattctaattgaggtgtgagttactgaggcctctgccagggaggttaaccctacagaatctgtagggttcattatatttaaactgcatatttcggcttgtctaaatttttgcctattttggtgaaaacatgttgttttgtcgatgtttaaacttagttcattttgtccctctctagttcatgactaccatttttttcatttttaatccagcgatttttttagagtggttctttaagcatcttgtattagccatttcaatggtcattatatatgtttggatttctcttattttgttgaactagaagaactgtgtggttacgccccaaaatttttttttgtcttaaagccatgatgaatggggtgactctgaggtgaccattaatcgcgtataaaagtaacctgactaaaatgttttcattgttttctacagttaaaggacttacaccagcataacacagcatttttttttttttttttttttgagatggaggctcgctctgttgtccaggctggagtgcagaggcgcgatctccactcactgcaaaccccgccttccgggttcaagcgattctcctgcgtcagcctcctgagtagctgggattacaggcatgtgccaccacgcttggctaatttttgtgtttttagtagagacgaggtttcgccatgttggccagactggtcttgaacaactgacctcaggtgatccgcccgccttggcctcccaaagtgctgggattacaggcgtgagcactgcgcctgtcctataacagcatttaatacagttttgtaaaatatcacattttgggcttttgtcaacagttgatgaagtctcaattgttttaaaatgagaaattcaaacagttcacaaatatatctagatatattcatttgagctacttgtagaatgatgctgtttgcatatatcaagcatatgcttgatcataagtcagatttagaatttttggattttgttttctctttctaaaatgtgtaattttggtaatgggaaatttgactgaattccagtttctcaggaacaaggtattttaggttgtgtcaccttaacactattacctggtgtaattggcatccgggaacatttgtttttaactatgagagtgaatgaaaactagggtagtgcttacatatgtaaaactaagatggtaggtagtcggattcttacaatttataaggttctcataatctaagccttgatgagttgctactgcaaattatattatagatcagataagtaccaaagaccagttgtaaagagggtctgttaacattttaatcagtttaaaattggcggtaacagtaaagaccgttcagcccaaagactgtatttcattatttatattccaaatgagaattttttgcagtttggaaaacttgtaaatgtgttgaattcatctttttattgcttttttactcccaatgtttagggcaacggtcttttcttctctcctgtctccctccctccctccctttctccctttttcttctttttcttctttttctttttttttttctgagacggagtttcgctcttgtcacccaggctagagtgcaatggtacgatttcggctcactgcaacctccacttgctgggttcaagcgattcccctgcctcagcctcccgagtagctgagattacaggcgtgcgccaccatgccaagctaatttttttgtattattagtagaggacggggtttcaccattttgggcaaggctagtcttgaactcctgacctcaggtgatccacccgcctcagcctcccaaggtgctgggattataggcatgagccaccgcgcccagcctttttttcctttttctttccatcttgctcagtgccccagcctggagtacagtgctgcaatcatagctcactgcagcctctaccacccaggctcaagcaatcccacttcagctgctgcggtagctgggactacaggcacacaccatcacacctgtctaattttttgaaaaatttttgtagagatgggggtctctctctgttgcccaggctggtcttgaactcttgggttcaagtgatcgtcccacctcgacctcccaaagtgctgggattaaaggcatgagccaccacgcctggcaagtagttttcaatcttggctgtacttttagatcccttgaggagctttacaaaatactgatacctgaattctagccccagaaattatgatttggttggtctagggtgcagccaggttagccctccgcagtgattgagtcattagggtcctctgactttttcttttgaactgtttcacttgtgttagctttacattctttaatacagtgttacacacatgtacagtgtagccatctcacacatctaacttaacgggtcttttgaaagtattgccacatttgctttgcttctgtgtctgtctctttcttttctctcccccttcctgtcacctattcctttctcctctgtttctttcttcactttcagtttatttgaactgtctggtagtaagttttaggaagctgtatttcccatgatgagaagttagtatatcatcactattttaaataggaagttgattttcttttaaagtatattctcaaatgcttacttgtactccttttggagactaattactttaagtccccaagttagcatctgaactccctgtgggcttggtctggtggctcacatctataatctcagcacttcaggaggctaaggcaagaggatcacttgagcccaggatttcaaggccagcctgggcaacaaagtgagacctcatctctaaaataaataaataaataaataaatataactcccaatgcaaattgtcttcttagggcgttaatctacttggtaaaccttacattttcaagcccccaattaactagtcacttaactggtttctgagaggcaggttgcattgggctttttctgtcagggcttaattaatacactgtgagacatttgctcagctaggccagctagctagtacttctgtagagatcatctagggcatgttcagctctccatttacatcacctgaagtagttcccaagtgctgggctatggagtagtttcatctctgtctctggaagagctatttaaaaaaataaaaatattttttcccatctgattgcaacacacatgctgcttcagaatgggaatggagtggaggaggcatgggaatctgtgttatttttaaaaagtgcctcttgattctaaaggttttgtttattttggtatgcttatccttactgctttatttatctattttttagagacaggttgcccaggatggagtgcagtaacatcatcatagccctctataaccttcaacttctgggttcaagagatcttgcctcagcctccagagtagctaggactacaggccggcaccaccacgcctggctgatttttttaaaactgttttgtagaaatgggggggcgggggtcttgctttgttgcccaggctagccaaatcttatttatgatttaaaactaggaatgctaccgaatatatatttttatagtaaggtattatttctgtatgttaatatggatgaatgtatgctactcaggtcttttcaagtcaaaatgtatttctaaatataagatgaattaaggatatttgtcagtgatattcactagtgaattctagagcatatgttatcagtagatgggcagtccttgtaaaaattgaataatctagtgaaaggatgaccggaaataatatttaatggggtaagctaagccaggaatcattgtacataaacacattaggtgtgtcttacatcataaatatgcctactaaaactagttgaaggaagaatgtgtatagatgctgaaataatgaaggggctggctaattgtaaggaaaaatgatacaacttctatataattagtctttttaatcagttgcatatactcatgatacttaatttgtaaagtaaagattgtagactagatcaatgctttgtaaaactaacagtacctcagacttccagagtgttttttaaaggtacagccccacccttgattctagttagtggagctggcctaacctgcgggggattttgatacatccccctttgaaggaataagctagatgacttgaaactctgcttcagttaaaagttttatgaaatgaggccgggtgcggtgactcacgcctgtaatctcagcactttgggaggccaaggggggtgcggattacctgaggtcaggagtttgagaccagcctgaccaacatggtgaaaccccgtctctactaaaaatacaaaaattcattgggcatggtggcacatgcctgtaatcccagctactcacatgcctgtaatcccagcttcttgggaggctgaggcaagagaattgcttgagcctgggagacagaggttgcagtgagctgagattgtgccactgcactccagcctagctgacagagcgagactgtctcaaaaaaacaaaaaaagttttataaaatgtatttttcagttatcagttattaaaattcagtttggtttccaccatcttttaaaacagtggttcccaaagtatggtccacagactcctggagatccctaggatccttatatttaaggggttcacaaaatcaaaattattttcataatgaaactgagacgttatttgccctttcactgtgaggacatttgtatgggtggtgaaggagcagtggtgggtaaactgctggcactttaaaatgactctaggcagttataccaaacatatgagtcctcattgtgttctttatagtcaaacacacataagcatttgaaaaaatgccggtttcacttaataatccccttgctgcagcagtaaaaaggtttaattttaaaaaaatctctaccttggagtatgtctttttaatagtgtgattaaatgggaagtatgcataaagcatttctgcacattgaagtacagtgttcttttctaggaaaagcacttgtgttattgagctgcaagctgaactagctgctttttagtgggacaccatttttatttttatttaacaggatgacagataagctcagatagctatttagatttgagtatttggcaggtaattccttggaaatgaataaagtgagctggccacttcgaggagaacatttatagccagtgctaaaatctgatgtttcaagtgaaaatcagatttttgggaaactcctgtcactatgacttgccagtttcttaatacttaaagacttttctgatgagatgggtggtgatattaaggaatgtgattaaaaaaaatatgttgggctgggcacgatgatgcacacccatatttctagcactgtgggaggcggaggtgggagaattgcttttggccaagagttcgagaccctgtttctacaataacatataaaaattaggtgtagtggcatgtagttctagctgctcaggagggtgaggtgagaagattgcttcagccagggagttcaaggctggattaagctaggatcgcaccactgcactcgggcctaggctacagagcgagactggggggggggggggcagtatgaggaagtgtgtcaacactgggaagatctgtgtaactcattgaaccaatattttcccaaatgaccaattcatgttacaaaatcgtgcatgggtaggcgatccgttcaaagtacaacatagacaaatggatttttatatacaccagagccaaaaagttcactgatacagtgaattccacattgcaactaacctttcagaattgccacttgagttttggtgttgaataaaagatgaatatccattgttttctgagaaggctgttaaaatactcctctcttccaattagctgtccatgtgagacacgttttcttcatgtactttaaacaaaacaacatatcatagcagattgaatgcagaagcagatatgggaatccagctgtctcctattaagctaggcattaagagaaatttgtgaagatgtaaaacagtgttactctgattcctgactttgttttagaaaattctgtttttcataagatgtttatattaacgtaatgggtttattattttaaatgaattaataaagcaaataccaaaaattttagtagttttatttatttataatatgataaatatcaatgtatatagcccgcataaaagctatttggtgtctttaataatgaagagtataaataaaggtccaacttggccaacatgacgaaaccctttctctactaaacatacaaaaattagctgggcatggtggtacatgtctgtaatcccagctacttgggaggctgaggcacgagaatcacttgaacctgggaggcggaggttgcagagagctgagaacatgcctctgcagtccagcctgggcaacagactgagactatgtctcagaaaaagaatatgaataaagggatcctgagatcagagagtttgacagctgctgttttaaagtaactatttctatgcattatcaactaaattactgattgattgaattgtttttatggtttgtactatattgctgttatttctaaggacgttagtcattcagtttctgttcagttatcagggaacatgtaagagtcagacttaagtaaaaaggggaattcattggcttggtctggagatagagctgacctcagattgctatatccagggtttcaagcagcatcaccaggactcttgactttgctttctttctgtttctcaggtagtttgcaggctaactatccccagcttcaaggaagcatgaagagggccttcccccccccacccccccacccccccaccccccgtagttccatcggaagtgctagagctatgtcacttgcctgccttgcgttctttttcatcagaaacaacactgtggccagggggtggctctggttagtctgggaattgtcccacctggccagatggggagattctccttggaaaatcagactgctgttttacaaatggagaaatacatgctggtacacaaaaactgatgtccacctatagtactttgttatttcttcttttaacagcctttaatttattaatccaaaaagggtaatttttaaataagatcatttaaactgaaggtggcataccaaaatgacatttaagacacataggtaaacaagaagcatacatctcgatttgtcctttgtcattcatcttaaaagttaaaaaaaaactttttgttgcttttattgctgtataaatgtgctcttggaagttcgccaactgccctcagtttgaagaacctcaacttgctgtctaggatttagtctttagcttgtgctgcagacagttgcactaaccgtgaacacctttttttcctgttggtaaacctaagtttagagtttattcctagtaataacattgatatattaccaggcccagcttttttctcctcccctagttaaatttaagcacttttgcgccgggcatggtggctcatacctgtaatccagcactttgggaggccaaggcgggcagatcatgaggtcaggagatcgagaccatcctggccaacgtggtgaaacttgtctctgctaataatacaaaaattagctgggcatggtgatgcgcccctgtagtcccagctactggggaggctgaggcaggagaatcgcttgaacccaggaggcagaagtggcagtgagccaagatggcaccactgcactccagcctgggccacagtgaaactctgtctcaaaaaaaaaaaaaaattttaagcacttttctcaaatattcccatagtaagtagtttattgatcactgatcaaaacacttacaacttctagaaaatacatgtttgacacatataatacagttaattcaaaagtaaactaacatctgagaaaaaatgtcaacactccttacctaaaatacatgaatttacatgagaacctctctctggccagtattcagcctgtttaattttagagagtatcttaattagtttggttatttggctttctcgtccatttattagtatacctatggtcaacgtcaggtgacagcttacaattaatagcaaggctagaggaaaaacaacaggcagataacaagaatcagctgtctcttcttgctaactctttacctctcataactcttgactgcatctaatacctgtatatgttagtgcctttcagataggcctaacttctcatctcttcaaactcaagatatctaaagctgaatttgttacatacctgcttttaaattttttaatcattgagttatctagaaatgggtcgtcttttatttgtcccccctttttcacccttcatatttcagttggttaaagactccagtcttttctacctagaaatagctcactgatttccccctcccctccttggcccattgcccatgccccagtctaggatcttaccgcttttctggtaattgtttcctaactggttttctatttccttttccaaagctgttctccaggctctcactgaagttttctaatacaaatctaatgctgttttttctcctctttctaccatgaacctactctagacaaagctcttatccgtctctgcttttcctcatcattttccttcagcctggcaaattcttattcgtatgtggtaatccattaatactattctaccaatattctgatggctgtcccctggcacatggtagtattgtgcttctttgtctccctcatccctaccttgaaattaggcatggcccagagtttcttgcattggcactgttgacattttaggctggataatttattttgcgtgttgtccagtgcattgcagggtatttagcagcaaccatggcctttagccaccagatgcccagtagtatccagttgtgaccatatattgcctccagatgttgccaagtgtcccctgagggacaaagttgcccctggttgagaactcctggcatggccttatgactttggccagtcaaacatgagcagaagtggtagcctttaaaagaagatatatgagctgtcctatcccttctcctgccatttaaggacatatgtagaaatggagcctttgtcagtctaatttctgagcgatgacagcagtgcccccagttgatctgtgatgaatgtgtattatatcctaagcagaaaataagcttttgttttaagctactgatcttttgggggttggttgtcactgcagcatagactagccaatcctgactgatacgttgtgccaagacctaggttacctatgaactttccatgctccctcatttatagtcccaaatcactttatacctacttcttttagcatttattacttatgtaataatatgtttgggtcttccagattagtagttctcagtggagtaagtactgctctttaagggatgttgtagaaatttgtggatgggtttggtggattggtggccagggatgccatcctgcaatgtgagagacagcgaataattatcttgcatcccacaagactttcagatgccccagaaattcatgtaggaggaaaatataattagcccagaacctaactctataatatatattcactttgccaggagttaaatttcttttaattcatttttttcttgcctgcctgcctccctccctccttccctccctccctccctccctccctccctctctccctctctctttctctctgttttctttctttttccttcctccctccctgcctccctcccttacttcaggctctgttacccaggctggagtgcagtggcgtgatcttggctcactgcaacctctgcctcccaggctcaagccgtcctcccacctcagccttctgagtagctgggactataggcatgtgccaccatgccccactaattttttgtattttttgtagagaggaggtctcactttgttgccaggctggtcctggcaaccgtcctttgttgccaggctggtcctgagcttaagtgatccaaccatgtcggcctcttaaagtgctgggattacaggcatgagccactgtacccggacttggttgttttgttttttatttttgagaccaaatcttactctgtcacttgggctggagtgcagtggctcagtcatagctcaccgtagccttggtctcctgggctcaagcagtcctcctgccccagcctcttgttaattcattttcttagttcaagttgtttaagagttcaccatttgggaaaatccatgttactgactgcagtgccattgtgctatttgagttgccagtataacacgtttgtcttggaaggtctgaatttgtagctgtcacatttgtaatgattctgtatataagtgctagcatctaacttctttattatacattctaacttagttggcatgcctgagtatttataggtggaagtacacattatatattaagcttttcctcctttttgttatagttagggcattgttaaattttcaaaatatgtttaagtagtttagaattttgtttcagtaaagctaaggtggtgatataaattatttgttggaaaaaaaatgggatgttggtctgagagagtccagacccactttcttactatgggcttcctgtttttgtatctgtagtgctttgtatatacagtgtttgttgaattggtcaatttatgtttcccacatttcttttatgtacgttgttgcatctaattaccacaataaatttgtgaagttgtcagggcaggtgtttccattttatagatgagagaattgagagagatgttaacattcagtcatgcggctagacctttaattagaatatataattttatttatatcgatattatgctcttgcctaccatacttccataatctagaaccatttaatgtaggaatacatctctttattcctgctagtattattttttatatgcataacttttaattatgtttcaggcacttgtggtcataggaatacaataaagagagagatgagaaagctgtttgtttaagaaagcgaggtcattatcatttgtattcaaagcaacttggtattaaaacaaactttgagataccgttaaggccccagcatagcataaattttagaaatgatgacatttgatggtgagattgtggtgaaatagttaacacttaaacattttaattgcattgtagattcatacacatcttttggaatataatatcagaaaatgacttcaaaagtgtctgcactcttctaatttgttgtaagacaattccacagaataaaaagctatggtcagtccagaaacacttgcctggtatatgtcaggaactgtgcatggtgctgggaatttctaaaatgagagtgttgttgctgttttcttggatttctaatttgtggcaacaatgtgagacagatatgtaatcaaataactaatgtgttacattgtaatttacacatgtaatttacaattaaattgtaatcgtaattgttaaattgtaatttaacgtatctttccttttccctctttcccgattcctttcctttctactgagtctcactctgttgcccaggctggggtgcagtggcacaatcataactcacagcagccttcaactcctgagctcaagcagtcctcctgcctcagcctcctgaggagctgggactacaagcccacactaccatgcctggcgaacctcctacatttttttagacagattttaatagaaaatgcagaaaaatgcgtaatgcattttaggaaaaatcttcttgtaaaactattattatttttttgagatagggtctcactgtgtcacccaggctgtagtgcagtggcacaatcacagctcaccaaggccttgacctcccaaggctcaggtgatcttccagtctcagctccccgcgtagctaggacaacaggcgtgtgccaccacacccagttaatttttttattttgagtaaagatcaggttttgccgtgttgcccaggctggtctcaaactcctgggctcaagcgatccacctgcgtcggcctcccaaagtgctgggattacaggtgtgagccaccgtgcctggccacaattaagcatgttaatatttcaacagtagcttttttactgaacactatgtatcagacacgttatgcagaatttttcctttgagcttctgtataccctccttttaatccagattcagagtaacttcattttctgactactatgaaaactggaattctaattcaaatctcttgactccaaaatctcccatgcaggttatctttggttatttggaaagtgtaccttcagcatgtgtattaatgtgggcaagtgctctaagacatatgaaaaactgcttctctgcatggggtttatgagttgagacagacatttatgtgaaagagataacaacagagggaggagcaagtcttcaatatcaggtgattgatgtacattctgaagaggctcaaaactacaacagtggcagggagaatgggaggagagatagaaaagactgaggtaaagaatcttgtaactgtaacggaatgtagggatagtgaaggaaagaggcacgtcagagatcttttgcaaagcttcccaaggctaggtaattgagtggaattgatactttaacaaaggtcttcagaagaggaagagattttggtagaatgatgagttttattaatcttgtgggaggatactttaaggattcaagtatgcagtaaaagaaaatgaaagcaagataagtctggaatgcaacttcagtgaacaaataaaatacaaacaagcacacaaagtacaggctccagtcctgctttatcttctttattcttaagctaatggccttttcctattctctgtggggtcttgggatcagataagttagttttctacctgttgaatggattctttattaatcttcagtttttgttattttaatttttttgaaaataatttaccctgctgcttttacaggtaaaatcttttgaggaatttagtgatctctttaaagaacagctgtattgagatataatttccataccataaaattcactatttgaaagtgtacaattcagtggtttttactatagtcagagttgtgcaaccatcaccattatcaatttttaggactttttcattataacaaagaaacaccatacccattagcagtcattcctcattccccttcctcccaggccctggcaaccactgatttactttctgtctctgtggatttgcctattctgtatatttcatataaatgggattatataatgtgtgaccttttgtcactgacttctttcacttagcatgtgttttcgaggcttatccatgttataatttgttagtactttattcttttttatggttgaataatatttcgttgtatggaattttatctatgcattcatcagttgatggacatttgagttgtatccattatgaacaacgctgctatgaacattcatgtacaggtttgtgtggacatgggttttcatttccctcaagtagaagtgtgaagagtagaattgctgggtcatatttactctgtttaacattttgtattaataccagactgttttccaaagtacctgtgccattttgtaatcccagcaccaaggagtgagggtccaatttctcggcttcttcaatacttactattgtctttttgatatatccatctcagtaggtatgaagtagcagctcattgtggttttgattttcatttccataatgtctaatgtcgagcatctttcatgtgcttattggccatcgtctttggagaagtgtcctttagaatccttttgttcatttctaaattggggtttttttttttttttaattggtctcttttaacaaaggtgagtgttaactgctaggtagaatttcataccaggcgatggtaaatttttcataaatattagtaatagacttttaggtttaactagtgctgatcctcataagtaatcctttaaaaaagtgctggtaagattttcctttagggtgactagtaaagtcagtaagacttgattgagcatgccactatcataatgagaagacctaactttaatatttttggaatgtcaaaaacagtgacattttaattaagtaattttatttttaaaaattatttttaatggctaatattttgtaagaattttaagtaattttcaactctgagcatcaaattttaattatgtgcattgaatctctgacttaaccagagcaatttcatcttttcccaagtagtcagatctacttcgtaaaatgtgttctgatgtgtgtcttttttttttttcttttttaggttatcctgaatacatgtctaacaattttccttgcaacgttagctgttgtttttcactgtttccaaaggatcaaaattgcttcagaaattggagacatatttgatttaaaaggaaaaacttgaacaaatggacaatatgtctattacgaatacaccaacaagtaatgatgcctgtctgagcattgtgcatagtttgatgtgccatagacaaggtggagagagtgaaacatttgcaaaaagagcaattgaaagtttggtaaagaagctgaaggagaaaaaagatgaattggattctttaataacagctataactacaaatggagctcatcctagtaaatgtgttaccatacagagaacattggatgggaggcttcaggttagtcttataagagtttttctataccctctatggtggcagatttaaaaacttgctacgtttcctttcaagctactacagggtaatttaatttgtgctccatctcttcagatactgtgcatcctgtacaaatatgcattatgggaatttctggaagaatatgcaaaagataaaatcttaaagttttttaatgttctactcagaaaaatgttcaatggagaaaatttggaaaataaaaataaaaagcagaaaacccacacttcgcaagaactacctttagcactttggtattcatttttgtagcctgttgttttcttttttttttttttcctagacggagtcttgctctgtcacccaggctggagtacagtggcgtgatcttggcccactgcaacctccacctcttgggttcaagcaatcctcctgcctcagcctcctaagtagctgggactacaggcaagtgcaaccatgcctggctaatttttgtatttttagtagagatggggtttcaccatgttggtcaggctggtcttgaaccgctgacctcaggtgatccacccgcctcagccttccagaattctggcattacaggcgtgagccactgtgcccagtcgtgttgttttcttttttgatattgtatgtacatttaaacaaccggattacacttagtccttttataatttagaaatctgatatgtttcactgttagcaaatgtttcattggtcacatttttcaggtagaacttcataatacagctcccttgcttaaataaatcttacagaaattttgtcgtagattttaaagttttatttcaagactttacacatagtttctgcaacacagtctttttgcatatttatttattttattttatttttttgagacatggtcttacttttgcccaagctggagtgcagtggtgcaaaacatggctcactgcagccttgacctactgggcttatgcagttctcctgccttagcctcctgagtagctaggactacaggcacataccaccatgcctgggtaattttttattatttgtggagacaagggtcttgccatgttgtccaggctggtcttgaactcctgggctcaagcgatcctcctgccttggcctcccaaagtgataggattacaggtgtgagccaccatgcccagtcactttttacatttttaaaacctgagcacaggccttgaaattataccaaggtttaaattctaggtctgatgtatgacatggccaagttagttattgtgaattttagttttcttatttatgaaatggggattgtaatactgagttggtaggattgtgaggattaaatcagaatatataaaagtgtcttgcataatgtgacacatgaataaatggtcgtttatttttctaggtggctggtcggaaaggatttcctcatgtgatctatgcccgtctctggaggtggcctgatcttcacaaaaatgaactaaaacatgttaaatattgtcagtatgcgtttgacttaaaatgtgatagtgtctgtgtgaatccatatcactacgaacgagttgtatcacctggaattggtaagtagactttgctttcatcctaagaaacataaagggaaaaggatctcaatagtgtttcaatttttgtaagttaaattataaatttggaagatagcccgcgactttaaataaggttaaagaatcagacatttttaatatacgtatttaaatttgaatttaggaacaaacttatattttgactgctaaaaccgagtattgtagttgatattttgcccctttagaacattgtttttgagaaataagatggaaagcattataaatttgaatacttagttatgtattgttagatagcgtttatgctacttctgaattgaaatggttcatgaacttttgtaatctttggtttaaatttacattctctgtttttaaatggaaaatactttcattgtaatgattaatgtttcatttgttttcccctttaaacaattaagatctctcaggattaacactgcagagtaatggtaggtaatctgtttcttactactttctctttgttttgtcctatcctctctgtttttttgttgacctagaattagtttgtgtgagcggcaggcagtaacattaacaagaaaataacttactgctttggaaatgtagattttgaggttaggggcatttaaaactggatttaaaactggatttaaattggctattgctctttgtatttgaactgcaatttatgaactaaagtactgtaaaaaaatatgatagaggaatgcaccaaaaacaaatataaagaatattttttgagttaagacctatttttgaagaaaatctcacagagccagtttaaatggatgttaaatacccagaatatttggtaatttggaatcacatataacatatcctttaaaaataccagtattctaattttccttcatttcagcctaacatttttatgaatgataatgttgagaatggtttaaaattgcactcttttgtattttttcagtcttgttacattttgagtaaataaatcaaggctactttaaagcatatgcccatcacagcttacctaattgtatttttaaaaagaaaaagtgttttaaggtgagaaaatgaaatgtgaatgggggtgtttttgttttttattgtaatatttgagaatggagttttattaaatctttagctctgttacttagaacttaataaactaaaatttctgtaagaactaattaatttgcagagaaactcttataaagaaccactgtcagccaggcacggtggttcacacctgtaatcccagtactttgggaggcttaagcgggtggatcacctgaggtcaggagtttgacaccagcctggccaacatggtgaaaccctgtctttactaaaaatataaaaaattagccaggcatggtggcgggtgcctgtaatcccagctactcaggaggctgaggcaggagaatcgcttgaacccgggaggtggaggttgcagtgagctgagatcacgccattgcactccagcctgggcaacgagcgaaactgtctcaaaaaaaaaaaaagtggggggaggctgggcacggtggctcactcctgtaatcgcagcactttgggaggccgaggagggcggatcacgaggtcaggagatcgagaccatcctggctaacacagtgaaaccccgtctctactaaaaacatacaaaattagccggacgtggtggtgggtgcctgtagtcccagctacttgggaagctgaggcaggagaatggtgtgaacccgggaggcagaggttgcagtgagccgagatagtggcactgcactccagcctggttgacaaagcgagactctgtctcaaaaaaaaaaaaaaaaggaaccactgtcatcttagaaaggtgtgctcttgttctggagggcagttagtagtagtttagcaccttttttgtttgtagaattttagaggtgggtcagaaatactaggtgaccttaaccaaaatttaggaagagtatgcaattctacttgtttttttttttccacctttctcccatatcactggtaatggaggaagactcactgccttgtggtgcttgttagtgattagtaggtttctgacaagtgtgggtttattattaggagctgttgtggtggtctgggaagggttgctttaagattggtgaaaactctgcttctttgctacgcagacattgatattgtatcacttctttttttttttgaaagtaaacacgtttcatatcttcaccattttccatccatgtttttggagaaaacgtttgtctcagtgggtattaaaggttgggagactgcaatgataagtgtgtctgaatctctctatggggctgtttgtgagggggttcaaattctgagtgctcatcacacacctcccctattctaaaattattgatgcactgttattgatgggattgtacgggttgatagcctttctatagtgactgtagggctgtattcagccttgtagatccccctagtggtggttttgtaaaggctgtcttcagtgtcttatttcctcagaaaacaactggtatttctcacagctccttctagatttggacaaaggaatgatacaagagcaggtaactaaaagttaagaaaatgggacagttccttcatttttgagttaaagtcttgtggtaatcatttccagcctatcttttacctttcatgaaactttctatgaccacgttgacctgtgtattcattttaacaagtatttaataagcatgtattgcctggtactgtgttaggttccagggatgcttagataataaggtatgttttgtctactcaagtgagcttatactctagtggaggagagaaaaagtaaataagagagtgataataccatgagataggtgctgtgtcctggttgctggtgatgataaagaacacagacctaaggtgggcccagtggtttcagcttttttgtcacctatagagaatatattctttgaccctcttagaacattttttttttcttttttgagacggagtttcgctcttgttgcccaggctggagtacaatggtgcgatttcggctcactgcaacctccgcctcccgagttcaagcgattctcctgcctcagcctcctgagtagctgggattacaggtgcccgccaccatgcccagcatttttttttgtttgtatttttagtagagatggggtttcaccatgttggccggctggtctcgaactcctgacctcaggcgatccacccgtctcagcctcccaaagtgctgggattacaggcatgagccactgcacccagccctcttagaacattttataatcactatatatatgtataactactctaaaaatatggttaaataataatagctaacactgggtactcgtgtgtcaggtcagactgagctaaatgatttctgagtattgtgtcatcattctcatgatacttctacatgggaggtgggattatttatactttaacagatgaagggactgctacctggagaggtgaaggaacttgcccaagaataggcaactaggaggagccggagtaatgtgtgcttgctattagatatttaaacaatggaaaaatattacaaaagactgcaaactccatgacagcagggatatttgttttgtttatggatatatcccaagtactagaacagtacctggaacagaagtgctcaagaaatattttttcagtgaatgaatttgttgaatgctagcccataaagagaaatatttaacagtttggtatctgtttttctggactttaaaaaatatatactatatgtttttttaattttatttttttgaataggcaatacatggtccataaatcaaaatactataaaaaggtatacagtgaaaagaagtgctcccacccctgcccccattcccccctacctcaggtaatcactttttttagtttctggtgtttccttccagggtttctatatgcaaaaaatacatacctcctttcttacacaaaacgtatactatgcatactgttctggaccttggttttttacttacagtatatgattttttaaacatgcatatgatcatagtgtacaatagtgctttgtaacttgctttgattctcttggcaaaaatatattgcagacttctatccttgttgatacctttagttttacctgagaaacatttattatggattatctggggttaaagagatctgtagaccagtagaagtttcaaacttacatttgggaagtttagccagcatatttagggcaagaaagatttatgggtcataactgtttaaaagcagaatacagttggtacataaagatgttatgattgctgattaaactgaagagtcatctgaaaagcaaaagcagtgagtaccaagttgaccagttgtatcctcaaatcagctagcaaaaccagtaagttggtaaaaagatcccagtcattataacaacaaaaaaaacctaaaatgtccaggaattaattagagatgtcaggatttatatgaagaaaatcattgaactttgttgaagggtgtaatataaggctgaataagtgtagacataccaattttgtgccccaaacaatttttttctttttattatttttataacttggccaatgttgatgagtggttgtgttcagttttttttattgatacataatttgttacgcatccttttgattatctttttgtttccataaaatttctaaagaggaactttggaatgggatttataggtcttcagaatatcatcttcatgacttttgatgcatgaacatacttcttaagaggtttttaagaggttgtacatagaaacttgcacaatggatgattattactgccttaaactagtctcaatttaataaaaagtacccatgtaacttaactgatatttacatgtagtagattttttttcaaaggttgacatagggaaagataagggaaatgatatgctggttcttaatgaaaaagggaatgtctttttgtggtctactaattgactgctttaagaagagaacctactgttagttcagtggattgttaagttctggagtagtgttagtttagaagcaataaaggattggttgctaaaggtaaaaagcaaaccttaaaacaataacctaaaaacaaatgggaaggttctgggcagagaattaacattgttaatgcagttcagtttcagttttctttttgtcatacagcagagctaactatttcctggttggttaatggaaagatgttatgctgtatcagctggaatctagctttgcttatgaaggtgtaatcacataggtgaaagatgttgattactgagttttctcacaccatatattaatcaaatactcttatttgggttgggtttctagagggaaatttcagtttgacttttcatttataatttttccgtttggttctaaacctataggggacattacattcagtacacttcatttttaaagaatatgttgcttaacaataattctagatcctgggattggatatctatcagatcccactcatatctccacagtgtgaaattaacaaaaagatatagttaaatactcagtctctatttagaccgaataattgtttttctcagctggacacattttccagccattcggtttttgcctgccttatgtatttaggtgattattcttctaggtttatcaagaaactgaggagtacctttttaggattgttgctggaggctgttgaaacatagactagcttcaaatttgagagtcagattgattgataaaatatatctcatgctgttaccgctgaataaatgacttttgctggtaaagtagtatgcttttaaaataatatgaaaaaattctgaattaaggttagtaatttacactgtaattgattttaggtgttattatattacttgctaataagatttttttttctgggaatagaagcttataaaaatttaaaatatgtttaattttctatatagctccatcaagtatgatggtgaaggatgaatatgtgcatgactttgagggacagccatcgttgtccactgaaggacattcaattcaaaccatccagcatccaccaagtaatcgtgcatcgacagagacatacagcaccccagctctgttagccccatctgagtctaatgctaccagcactgccaactttcccaacattcctgtggcttccacaagtgagttctagaatcagatgtagtcagcaagttgagttttcctaatcattgcttatttatgtgtagtcacttggggggaaactccaagtaagtaaacattaaaagtaactgtagtatctttcataggtaaacaggtattaaacaggtatgcacaatcacttggaatttaagtaatggctttgattataatattgatttaaattaatgatctgatttatactttactattacatgtagcagtaagtagcctcttaagctcccagatatattttggagaaatatttaaataattaacaagtagttttgatccaagatgtttatgaaggtctgtgttaatggaattgcaacctttcttttaatgcggtgttcttattttggtttttctgggacaatattaccttatagtagttgtctgattttctcactgtgcaaagggatcttgacaaatttgttatatattgctcaagatagacattaattaagtcaattttgatataagctaacttctatatctctttttaaaatatatgtgtaattaaaaaaaaaaagtgtttcagaaagatccttcttttctgccatgtcataggagggagaggggctgctaggttcaggtttttgggggcatgatcatatgacctggttctgttacttattttcacagtaaccaaaggtttgatagtttgctgcttggcaaatgaagtagcttttttttcattttttttttttcaattaatcatagagcattgtcttggcatgtgtatggtgttagttgcatgcagttgctaaaggaatttatgtaaacccacatcagaatagatttttgacagctctgggctaatactgtgttagttgctaccgaaagtaccattattgtatttgctttactatcagattagattcaacatagaaattttgatctttggaataaatgggggactgatttctgtaattgtgagttttcaagtgaagtataccagaatttcccctttaattcattacaccacttcaaagcaacatgtttttggtttgctatctaagagatgacagtctcactataggcagcatattctaaatgggtcatataggttaagcacttgagaacccagttccttaatcacttggtgcttctattatctgtctactttttatttaccaaattaggaatatggttgacaaacagtgggtagtgatagaaaataaaagaaggtacattatagccacttgaacgtagattagtgctagagcacagctacctacttctgtttatattatctggagattgaatttctgtgcctttgtcaatgcttactaaagtgacttcattttgactgtgttgtttcctgaggttgaatcctattcaaagattagaaaaagtgatagaaatgaaatgcagctaattttatcctggtatttattgggtagattttaataatcgaataccgtaaatactgtaagttttagaacttgtgtcaaaatgttcccttatgtggtggcatgcgcctgtagtcccagctgctccgggggctgaggcaggagaaatggcgtgaacccgggaggcggagcttgcagtgagcagagagcgagtcactgcactccagcctgggcgacacagcgagactccatctccaaaaaaaaaaaaaaaaaaaaaaaagagggttcccttaggtctcaaaaagtatattgatgaaaagaagttgaactaaaatagaagatttgaaaggctattttacgtgagctgatttagtcgtattgtttaactttattttacatacttagaattgtataagggaagtattcagtatggataactacagtgagtcactttacaatttatgttcttttgacacctgaatattttaagaatttccttttaaatacctgtaaattaaaataatttatcctgtgtagttaatgacaatttttgtaagttagctaagagtattgcctgtagaattgttaaaaatatgaacaaaaccataattaacctttaaagataacttgcagaatctgggggatgagtaggaagggaggttgctaaaatgtcatttttacagataaataatttggggagtattgaaatattctctttagcttttggttttgtaattcttagctttaaggaaatgtgatatgtaaagaaaagaaaaatattccttttctttgatactttgagcaatggtgacatgttactctcttccatctgattatactcccatttagaaaagaatgaggtgatgccagttataaataattataactttagtgctttccaaataggattaacagtcgagttaattaatgctctttaagaaaccaaatttccactttaaaaaaaaagccttaaaaatgtaggacagtaagcaatatcataggatggtttttgaatagaatacaagccaagagaagcttgattctcttggtatattacatacagagagggcaattaatttcttgtacatctgggaatatgatggtgttcttgaaaagaaatgattcttggtttataaaagctcttgaaaaaatttgaaagtagactgatagtttttttgtttgtttttaaccagtaaatggtatattgattggacagcagagctagatctttttaacttcctcatcttcactatcacatcctatttaaaataattttctgctctgcttttctctgtcaaaccctagcattctgccattactagtatcagtgctgatagtgattaatttttcagttttcaacattttcttgagcctggatttttggggtcctaatcagaaaggtccagagagagaggtggatggagtggccaggatgaactgacatacctctgaagaagttaatatgataggccagacgtacagtggtgttttgctggcatttgaaatatgtttgtgaagaaataagccactacaattagttagacattacctaaaatggaataattttgagcttcctcaagttaaagtttgcctttatagatgactgtaggttttttacctgataggccatgggtgagttacactttttgcccatctttatagttgtgcattatcagataaaattggtccttcatttagtatatgaaatcataagatgacatctatgaatgtaccatgttaatgtcttcttgttcctctaggtcagcctgccagtatactggggggcagccatagtgaaggactgttgcagatagcatcagggcctcagccaggacagcagcagaatggatttactggtcagccagctacttaccatcatagtatgtacatactttaaaaaatcttttaaatagttgagaaaaaagtaggcagcctttataaaagcaaattaacccatgtgggccttaatttttagacagcactaccacctggactggaagtaggactgcaccatacacacctaatttgcctcaccaccaaaacggccatcttcagcaccacccgcctatgccgccccatcccggacattactgtaagctcttgtttttgttgtaagggctattttttttttttttttggtagggctttgttttctgttttttaaaaatgtttttacatcttttattcatcctgtgattttgtttcattaaatagtgcttttcagtattttttgtaaacagtattatttttcatagttatcctacctttttattttagaggagtgatgtttgctaaatacatttatttctctgttgctaatgtttcattaacatcacattgatttccattcatttgtttgtttgctttgtatatgttcttagatctcatctgtgtcttgtatatccacgcataatggattgaaaccctttgagtgctaagttctcaaggtttccctcagcgtagtattcagtgtactttggataatgttgaatctatagataactctgtgctggcatgattgggaggaataccctacagataacatgtagtttcaggtagaataggagcattgttcatatggcttagtaaaatcgagagtataactcttatatacattaaatccctttcttctcattataatattaatagtaccaaagaaaacttagaaaatatagaaaagtataaataagaaaagcaaaattaccctgaatcctgctactcaaaaacagccacttctaatattttgttattttccttccagtcatataaacaggtatatgtaaattgacaggggctcctactctatgtgtattgtatatatcttgcttcttttcagttatgttactattttttccatttcttaagagaatgtaatttttaatggctgcctaggccgtcatagtgttgaagggtgctgggtttggacctttaacaggctgtgtgaccattgacaagttatttcacctcattaagcctcaagagtaataatagtagtatctacctcaaggggtgttcgtaagaagtaaacgtaataatttatgtgaggtgtttagcacagtgttttaacacattaccagttttcaattatgttagctatgattccattaaataaacatccttaattaacataagcacttgtttttagaatagacctaacagtttattattatacattgcattataaattgtactgtattggacgttacatgaataattcatttatgatctgtattaaatgttggatataaaattatgtgtaaattgtgtaataatagcacttggcagatagcactgaaatgttagttattaaatatccacaaaagtattaatagtttaagactatttgcttattgtaaacttttaagttcttagacattgcataagcttgttttaaacaattcctaacctataatagttatatttaagtaagatttactgaaagttttagcattagacaacttttagtaaataaaaatggaatttttgttgtcttttctttagggcctgttcacaatgagcttgcattccagcctcccatttccaatcatcctggtaagtgtatttcaaaattgatttcctgtatttagattgatttagtggtgattgaaacgcacaaacacaggctttaatggaattatggggtcacttctcagatgagtacaatactcatcatgacatgagttaatcaacagtttgagtagtcaatatagtcacacatagactgtctatattttattcagtttaactgtccccaaaagaaaagaactatcttttcagctaaaatgagaattacagaaatgctgacttcagcattgaatacataaatatgcagcagaataaaactaggtttcaaaatagaacagctgtaaaactatagcttaaaaagccaggaaagaatcttaagtacatgccgaaaagaaaaataattcactctattcaggatctctggttaactggaatttagaaactatttgattaaattgtatgcaaaagagtaaatcgctaagtagctttcttcagttcaaagtttgtgtataatttttgaaactgtagaggtaataaaacagaaaacacttgaaaataaaatactgaaagtcccttgtaacacaaacatagattttgaatttttttctcatcctttcgtatctgtttttcttagcataaaaagatgcaaatatattacttcagctaatcaccttaattttttggaaactataaactcaattttcctcctaattaaaagaaaattatgaagaattatatttttatttttacttgtttatttttgagagagggcctggctctgttgcccaaactggagtgcagtggcatgatctcagattactacagccttgacctcctagtctcaagcgatcctctcacctcagcttctagagtagctgggactataggcaagggccaccatgcctggctaatgtttgtattttagtagataacagggtctcaccatgttgcccaggctggtctcgaactcctgggctaaagcagtcctcctgctaataattttatttatttatttatttatttatttttttccgagatgggatctcgctatgttgtccaggctggtttcgaactcctagcctcaagtgatcctcctgtcttagcctcccaaagtgctgggattatagacgtgagccaccacaccaagcttgaaaaattaaaaaaatatatttttaaatgattttatttttgatctttgtgggtacataggagatgtatatatttatggggcacatgagatgttttgatacaggcatataatgcatgataatcacatcatggaagatggggtatacatcccttcaagcatttatcttttgtgttacaatctatactctgttagttattttaaagtgtacaattaaattattggctacagtcaccctgttgtgctgtaaaatattagaccttattcattctaactactttttgtactattaaccatcctcaccttcccccaatcccccactacctttcccagcctctggtaaccatccttctactctctgtctctatgggttcaattgttttgatttttagatcccacagataagaacatgtgatgtttgtctttctttgcctgggttctttcacttaacataatacctccagttctatccatgttgtctcaagtgactgaatcgcattttttttatggctgaatagtactccactgtgtataagtcaagcataaagaattttaagcataccggaataatacaggaagttcccccattgtactcattcctcagtttcagccattatcaagtaatgaccaatcttgtttcattcatactcactctctttcttcattctatattattttgaagcaaatcctatattagttttatatgtaaatatcttagtatatatttccagtaaaggtttttaaaacataaacacagcgcccataatgattaattcaaagggtcttaaattcttaaataggtctacataattttctttgtgtaaatgttctgttattgattatgttggtttaatttttcttctagctgtttaaaaaaatagaagggaacatctttgtgtttataacttttctcatattttagtttaagaaatttgtagaatttctagatcaaaaggccatattacagtgacaccagagtgtgagaaccagggttactgtgctggctagcagtagatgtcatagtttaataaactttttgctgatttaagaggcaaatacttgttctggttaggaaaaaggtgatattagtggggcagaagcattcttttaacgatatatatttattatcttctgtaacggattttctgtgttacattgtgtgttgtgattttaaacatttttgtaggtcaaggggtctagccttttcataaactttctttttttgagaaatgtaatatacagaaaagtatgtaacacaagtaagtatatagtctaacatcactaaaaccaatactcatgtaaccactacacagattgagaactaaaacattatggcatcccagaaaccctcctaccccatgaattttgtctctgtcaaaacctctttccttctccccagaggtagctactgtcctgctttttatggatatcactttttttttgctcttttatttattttttaaatttttatttatttattttgagatgaactcttgttctgtcacccaggctagagtgcagtcatgcaattcggctcactgcaacctccacctccaggttcaagccattctcctgcctcagcctcccgagtagctgggattataggcacccgccaccatgcctggctaatttttgtattgttagtagagatagggtttcaccatgttatccaggctggtcttgaactcttggcctcaagtgatctctgccccatcggctcccaaaatgctgggattacaggcatgagccaccatgcctggcccttttaaagtgatgaatacatccctaaacagtctagtaatctggctttacttgttttttttttttttttttttttttgagacggagtctcgctctgtcacccaggctggagtgcagtggcgcgacttggctcactgcaacctctgcctcccgggttcacaccattctgcctcagcctcccaagtagctgggactataggcgcccgccaccacgcccggctaatttttgtatttttagtagagacggggtttcactatgttggtcaggctggtctcgaactcctgacctcttgatctgcccgcctcggcctcccaaagtgctgggattacaggcgtgatctaccgtgcctggccctcattttctttttacctagctttataaatacttgtttaaaacaatttaacatttggactgattgtgtaaagaccacttttaagtgttgttactgttttttgttgtgttttttttggccaccaaaacattgggtaattgttgtcttagacaatctctgtagttttggtttaaccagtgtacctatcagttgtttgctgaagcttcttgtccatagcataatgtgataccttcacattacattttctatagacaatatatatatatttttttaaatttttgagacggggtctcactctgtggcctgggctggagtgcagtggcactctcatggcccactgcagccctgacctcccagacttaggtgattctcccatctcagcctcccgtgtagctgggactacaggtggacacaaccacgcccagccaatttttctatttttcgtagagacgcggtttcaccatgttgcccaggctggccttgacctcctgggctcaagtgatctgcctatcttggcctcccaaagtgctgggattataggcatgagccaccatgcccggctgaaaataatttcataaatacttcaaaactggctttttaagaagacactcagtgaagacacttagtgtatcactggtttttatgttctaagcataatgaaatatatgtaaacaaatatttatctttgtgacaagttcattagagtgacatggcaaaacatttgagtttttaagtttttgaattatccaatcttcatgtgatctgttttgataactcctcattgcattggaaagtattttattgcttggcagcattttgaaaagtaattagggtacatagcttttacaagttgttttcttttaaaaaaattttaagcatcaatcatacttcattttaggttattttttttttttccgtaagatctgggtttcttttttgtcattctaagtaactttgttgaaagtaagattgttgaaagttttattgcttcaaattctagtttaaagttcataaacagcttattgagatacagataaatctttcttttaaatatgtcgaacctatttccaccctggggtctttgctttcgcttcctctttgaaatctgttcagtcttcacatagataaaaggttattcaggtcccatcttttcagatgggatgtcccctaccatccagtctgaagtgttcttcccaatcatctgctgttccataccctgttttattttcttcacagtgttcattgttatctgagttatttcatttgtttgcttatttgtctgcccctgcacctctgtgagaacagggactgtagctgttttgttttctactgtgtatgcagtgcctagaaagatccctagatactctgtagatatctgttaaatgagttaaaacaggaaagccaaataatttttatgtatttgggcttgatgtaataattgttgtttacaaataaaaattagaaatacttgatcagttgtctttgtaaaccagagtagcacctcttttttcccagtgatttaaaattatatattattgttcaaatgagtacactaaatacatctccaaagttaaaattgtggtagttaacatgacctgacttcactaaaaataccttttgctatggcataggtgggacaaatgaccttctacccaagagacagttgagaatctgtgtgtacaacaactgtgtgattagagtataattaaccttaactcagggatgggatagctgacttgcttatgcactttctctcaattagggaatctataaaaatatgtcatgagtcgatgttattcaaggacagttccctggaatacatcttagggtcagtgtgtttttaaaaaataaaagttgagactacatagagaatatgtgtagtcaaatgaaataccatggtaaaataatttattttagattctgattatttctgttctttaaattctcagttgacctggtcctttgaggtaagaaccaaattccagattttaaaaaatgacttttagaacttgaggataagtggtaattggaaattaaaaaaaaaaattagtgttttaagaacagtgctaagtactgagctagaaaatagaagacatggaaattcctaccttttaatgcattatgttattttaatccagttgttttgggtgcattacatttccatctcccctccctttaccctttcttttaggaaaaactgtgttgtggagtgcaagtgaaagccttatatctttctcatgggaggatgttctttcccatttatttcctatagctcctgagtattggtgttccattgcttactttgaaatggatgttcaggtaggagagacatttaaggttccttcaagctgccctattgttactgttgatggatacgtggacccttctggaggagatcgcttttgtttgggtcaactctccaatgtccacaggacagaagccattgagagagcaaggtattgattgtatagtcagatagttactttaaaaaattgagcatagtacattgtcttttattcaaggttatgttttcccatgtacattatatgtgttcttaaatataaataaaggaataaaggtcatgttgaaaactcagaatttgtaagcactccatcttaattgtcggtgtttttgttgtttaacatataatgataaaagatagccttttttatgttagtaggtttctatgtttcgaatagtaagtataccttttgaaattcagtttgaaaattttattttctgtgatcatacatttctacaaattactgaaaggaagtaatattaaatgagaacatgtttctgaaagttttacttataatgttaaaaaaattggtaataaaagggaaatggttaagtaaattatgataaatttttccttttttatacagtcattaaaatgtttaaaagtttatataatgaggctgggtgcggtggctcacacctataatcccagcactttgggaggcggagtcaggcagatcacttgaggtcaggagttcgagaccagcctggccaacatggtgaaaccctgtctctaccaaaaattagccatatgtggtggtgtccacctgtaatcccagctactcaggaggctgagacaggagaattgcttgaacccaggaggtggaggttgcagtgagctgagatcgtgccactgcaccccagcctgggtgacagagtgagactccatttcaaaaaaaaaaaaaaaaaaagtttatataatgaaatggaaatgcttacagtgaaatattacaggaacattccattttagctactgtatgatctcggcttttaaggatgtgtgtgctaaagaacataatcttggctctatcacttgctgtcatgtgactttggcaaattacctaacctctaagccattctgcctaatagaattttctgtgatgaagaaaatgatttatatttgcactgtccagttcggtagccactagccacatgtaactattgagcacttaaattatagctcacttgattgactaatcggatttctaattagttttaatttaatttaaatagtcacatgtggctagtggctatcaatttggacagtatgccttagtttctttatctaaaaaaattagaataatagtacttattgagttgtaagggtttaatgagaattcatactacatgctcctgacacatagtaagtgttgtaaatatgtgcatcattattagatatgaacaggaaaagaaaaaaggaaatatacaaaaatgttaatagctatcttttggttttatgtgatctttatttttaatttttcaatattaagcatgctatacaatctgaactaaaatttaatttaaaatacttatcaagataaaatgtaatttcttttttcttcctaaggttgcacataggcaaaggtgtgcagttggaatgtaaaggtgaaggtgatgtttgggtcaggtgccttagtgaccacgcggtctttgtacagagttactacttagacagagaagctgggcgtgcacctggagatgctgttcataagatctacccaagtgcatatataaaggttagttacaattttatttgaatattttagacttaaagctctatttgttgtcaaaagaattgaaatctgggtggaaggaatggaaaaatgttttatatattaaataataagaaattgtgtttaagtataaaaaacacattttctgagggcatttattgacattatcagtaatctagttttatcgttgccaatttgttacattttgttttttattttatttatttatttatttatttatttttgagacagagtcttgctctcgtcgcccaggctggaatgcagtggcgtgatctcggctcactgcaacctgcgcctcctggggtcaagcaattctcgtgcctcagcatcccaagtagctgggattacaggcacatgttactgtgcctggcaattttttgtatttttagtagagacggggtttcaccatgttggccaggctggtctcgaactcctgacctaaagtgatccgcccaacttggcctcccaaagtgctgggattacaggtgtgaaccactgtgccaggcctgttacatgttttagagtaatacaaaggctcttgaaaatactgagtgaagcctccaaagttgtattcctgtaacttgaaatttgtaagaatcagactctggactttcatcttagccaatcttcaggattttatggaagagaattctaaaattaatagcttttcaaattaagaacctgataagcctgaaatatttttcactagttatatattcaacctgtttgaattttactttataatataacctgtttttgaaagagaaaggcagttgtaattagatagcctaaatatatttttaattgtgtgtcatcctcaacattttcattgtcagtgattgtaaattggtagaattaactgtgtctcataacttattaccaggaagttgcttaggataaaaataatgtagccccatagcatccataaaaatggaattgcctgattacctcacaacagcaaacccagtttctcatttccagttatagttcagttaaagaatgttggaatttttttatatgacacttttaaacatgccaagtatagcgaaaataataaaccacatgtacctatcatccagctgcaacaattatcagcactttaccaatctttaatgtgtttctcccccaacttttttttcctggagtcgttgaaagccaattccaaacagcatagtcactcataaaatatttctgtgtgagtaactcataaaatactcctgtgtaactcacaaatctatacagacttctgaaaaacataatcgcggtgctatttattacacttaataaattagcatcaattccctgttaaaattttcaacaatagagcatcagttatagtctgttagaacaatagaataaagcaataaagtattatatttattgataggatatccatgtgtatagaaaagttagttattaaacaatacataaggcctgatttagtggctcatgcgtgtaatcttagcactttcggaggccaaggttggaggattgcttgagaccaggagttcaagaccaacgtaagccacaaagtgatacccccatctctacaaaaaaattaaaaaattagctgggtgtggtggtgcatgcctgtagttttagctacttgggaggctgagatgggagcattgcttgagcccaggagttcaaggctgcggagagccatgatcatgccactgtgctccagactaggtgatagagtgagaccctttctcaaaaataaataaataaatagacaatacatagactatgatctcatttttgttaaatgatatcatgatatttgttatttgtttatatgtacccataagtctagactggtatgtataatggaattgtctctatgaggtggaaattatttgtattttgcagtttttttccacaagtaatttctgtattggttatttatgctgtattattattatttttgagacagagtcttgctctgtcacccaggctagagtacagtggtgccatcttggctcactgcaacctctgcttccagggtttaagtgattctcatgccttagcctctccggtagctgggattacaggtgtgtgccaccacgcctggctaatttttgtatttagtagagacggggtttcaccgtgttggccaggctggtctggaactcctgacctcaagtgatcagcccaactcagctcccaaagtgcaaggattgcaggtgtgagccactacgcctggccttttgttgttattttttaatggctttggatttccttatatgttttgtagtccattttgtattcgtgggccaagtttgttttgagagaattcactcattttattatttattttttcttcctgtcattgcttcaccctatgtggcaattttgccttaccctggcatctgggattcacatctcagaaccaaatcttataaatttaggaagtagggggactttgtctcctgaggaaattgagttccattctgcaggtatgcttggggcctaattcctgattgcctagatttctctgaaacttttccctgccgtgggcaaatattttattcctaggtgtacttctgaattggctgtattttaccagcacttgatttatgggcaggtgcccacttgtagcccccagagagtttggctgttgtctctctccatattattccaagaagtcaaattcctgttccctgccctttgtttatggtcttggtatacccctagtacctcctatctttagtctctgctctccactgtgggttttatttatcatcagtttggatgtatggattgtttccatatgaatttcatgatcagtttggagaggatgactattttaaatagtttttctgttatttgtatgtggttgaagcagagagagaaggtgattatgtatacccacttaacccatcttgactcagaagtctcttgttttatttatgtaatttaaagtgactggatagagaactatggtgttgaatatatactgtgtgccagatagtatttataaacttaatcagatatggagtagtatttaaaacaattgagcttaaataatgtggaatcgtgcaagtgtaatttcttggatgtcaaatagatacattgtgacttatttatattttggtacagatggcctttgaaaagcccccaaggtgtgagacaagtcatcacttgataaaccactgtcttggacagatcttaatagtgatctcatacttttaccatgaaaagtagataaataccttgttggacaagatatttggaatttaaaaaaatctcatttgtgtatattaactaagattttaaaataattatgtctgtttaccaagtatattactgttctttagaagagtcttactagtcagaaagagacagttacaagtacaaccccatccacaatttcactttccatggcttcaggtatccatggtcaaccacagtccaaaaatattaaatgaaaaattccagaaacaattcataggttttaaaatgtgcgctgttctgagtagatgatgaaatctcactccattctgcttgggatgtaaaaccttttgccagcatatccatgctgtctacattacccacccattagtcactgagtagcgagctcagttttcagattgactgtcatggtctcacagtgcttgtcatccagtaacctttatttagttcataatggccccaaagtgcaagggtaatgatgctgggatattgttaacattgttctgttttattattacctgttgttgttaatctcttactatgcctaatttgtaagttaaacttcattatgaggtatgtatgtataggaaaaaacatagtatatgcacagtactatctaaagtttcatgcatccactggaagtcttggaacatatcccccatagataagggaggaatactgtataccttaaaatttaaccattggcattttcttcattcgtttttttgggtagcagtaactaagggatttgtaagttatcagattttcacaggagatgatattattggggtaaattgtatgtagatagcatgcacccctggaaggagtgcccacactttgagtacacaaatgtgtgcatgcacatacacacacacacacatacacacacacacacacattcccctttttaattaaaatgaggaaaacacacttggagagccataatttcattttataagccaagaagctaggactaaattgtggtttttttcacccttctaagttgactttttttcctgcttctctcatgacatagtagtcattttttacttaacgaaaatctgatgtaatgaaatgacattttacaagctt

SEQ ID NO: 22502 - DNA, 3598 bp, Homo Sapiens
ggaagtcgatacgtggctgccttctgtccccgctgaggaggtgcagcagccggagatggcggcggtgctgaacgcagagcgactcgaggtgtccgtcgacggcctcacgctcagcccggacccggaggagcggcctggggcggagggcgccccgctgctgccgccaccgctgccaccgccctcgccacctggatccggtcgcggcccgggcgcctcaggggagcagcccgagcccggggaggcggcggctgggggcgcggcggaggaggcgcggcggctggagcagcgctggggtttcggcctggaggagttgtacggcctggcactgcgcttcttcaaagaaaaagatggcaaagcatttcatccaacttatgaagaaaaattgaagcttgtggcactgcataagcaagttcttatgggcccatataatccagacacttgtcctgaggttggattctttgatgtgttggggaatgacaggaggagagaatgggcagccctgggaaacatgtctaaagaggatgccatggtggagtttgtcaagctcttaaataggtgttgccatctcttttcaacatatgttgcgtcccacaaaatagagaaggaagagcaagaaaaaaaaaggaaggaggaagaggagcgaaggcggcgtgaagaggaagaaagagaacgtctgcaaaaggaggaagagaaacgtaggagagaagaagaggaaaggcttcgacgggaggaagaggaaaggagacggatagaagaagaaaggcttcggttggagcagcaaaagcagcagataatggcagctttaaactcccagactgccgtgcagttccagcagtatgcagcccaacagtatccagggaactacgaacagcagcaaattctcatccgccagttgcaggagcaacactatcagcagtacatgcagcagttgtatcaagtccagcttgcacagcaacaggcagcattacagaaacaacaggaagtagtagtggctgggtcttccttgcctacatcatcaaaagtgaatgcaactgtaccaagtaatatgatgtcagttaatggacaggccaaaacacacactgacagctccgaaaaagaactggaaccagaagctgcagaagaagccctggagaatggaccaaaagaatctcttccagtaatagcagctccatccatgtggacacgacctcagatcaaagacttcaaagagaagattcagcaggatgcagattccgtgattacagtgggccgaggagaagtggtcactgttcgagtacccacccatgaagaaggatcatatctcttttgggaatttgccacagacaattatgacattgggtttggggtgtattttgaatggacagactctccaaacactgctgtcagcgtgcatgtcagtgagtccagcgatgacgacgaggaggaagaagaaaacatcggttgtgaagagaaagccaaaaagaatgccaacaagcctttgctggatgagattgtgcctgtgtaccgacgggactgtcatgaggaggtgtatgctggcagccatcaatatccagggagaggagtctatctcctcaagtttgacaactcctactctttgtggcggtcaaaatcagtctactacagagtctattatactagataaaaatgttgttacaaagtctggagtctagggttgggcagaagatgacatttaatttggaaatttctttttacttttgtggagcattagagtcacagtttaccttattgatattggtctgatggtttgtgaactcttgctgggaatcaaaatttccttgagactctttagcattcatactttggggttaaaggagattcctcagactcatccagcccttgggtgctgaccagcagagtcactagtggatgctgaagttacatgagctacatgttaaatatttaaagtctccaaaataaaacaccccaacgttgaccttacccggctgatggttagccccttgctgcctgctccatgtgtcttatgagagcccgtagttacagtgtcctctaatttgaaatccataagttaacaagtctatatcaggtgcatctggctttgattaaaggccatttttaaaacttaaaaactcaacacctcacagattataatagaaaaagaaatggcctcagtttgatctcgttcagaatgacccagattgtttctgctttgggtgcagctgtttagttcagagttatattacagagaattattttctgagataatcttaaactagaatgttcaaaactaattgataattgaagtatcaagatacgtagaacacctcagagatttttcttcaggaacttccacaaactttgaatccttgtatctttatttggtattcatactactagtagcaaaatacaggttttttgttttgttttgttttggcttcatagagtatctcaaattgaaacttttctgcacaaagaataaaattaaggattttataaactcaaattggcacctactgaattaaaatacataaaatcatttaaatataattcagcatatgggaagtaacattgcactaatatggaaatcactgccagagacagtctattttcttttaatttgttactacttagtcacaaaccccacattattccagtttggaattacttattaaggagaattggaaatacatatgcccatgcttaaattttatagctttaatttgtgttatttctttattgacgggaagaggtacatctttttttccttactgaaaaccaaatatggattaattgcctcaaatttgtataaagtgattggctagtgattcttgttttcaggaagggagagtggtatagatagaaaatgacaaagatggcaatatacacttaatgttgttattgtatgttgttactgaagtacttagatttttaaaatttcaaatcctaaatcacttcttgtaggagggttttcattaactgcagtatatacagttcactacatatgggttgtttgagttttttgtgtgctgtatttctttctgtttttttaatacctggttttgtacatatctaactctgttctcttttggttgttcagaaactggattttttttttttcttaagcagtgcttaatttgtgttttttaattttgattcagaagtagtcccagctcataggtgttcataactgttacatccagaacatttgtcaggctctctgtcagcttttcatgtacatatggtatagaaaccatggagttaggcacttccctggaatttttttttttatgagaaaaatactgtatttaaaatgtaaaataaacttttaaaaagcaggcactaatatatatttcttccagcctttgattacaaatttgtccttgcacatgttaagatgaattatctcctaaaaatatcattgttcttgggagcagtgtatgttactttacatagcagcggttcctgtcatgtgttcatgttcagaaatatttttggttttaaactttcttattgcctttggctgttgattagtacagtacaagttgcgatttcaaaaagatcttgaaagtaatatatttaatcaattaaaatgtttatctgtaaaaaaaaaaaaaaaaaa

SEQ ID NO: 22503 - DNA, 2267 bp, Homo Sapiens
acagagctcaggacagggctgaggaaccatgtctccatccccgaccgccctcttctgtcttgggctgtgtctggggcgtgtgccagcgcagagtggaccgctccccaagccctccctccaggctctgcccagctccctggtgcccctggagaagccagtgaccctccggtgccagggacctccgggcgtggacctgtaccgcctggagaagctgagttccagcaggtaccaggatcaggcagtcctcttcatcccggccatgaagagaagtctggctggacgctaccgctgctcctaccagaacggaagcctctggtccctgcccagcgaccagctggagctcgttgccacgggagtttttgccaaaccctcgctctcagcccagcccggcccggcggtgtcgtcaggaggggacgtaaccctacagtgtcagactcggtatggctttgaccaatttgctctgtacaaggaaggggaccctgcgccctacaagaatcccgagagatggtaccgggctagtttccccatcatcacggtgaccgccgcccacagcggaacctaccgatgctacagcttctccagcagggacccatacctgtggtcggcccccagcgaccccctggagcttgtggtcacaggaacctctgtgacccccagccggttaccaacagaaccaccttcctcggtagcagaattctcagaagccaccgctgaactgaccgtctcattcacaaacaaagtcttcacaactgagacttctaggagtatcaccaccagtccaaaggagtcagactctccagctggtgagtcctgcccgccagtactacaccaagggcaacctggtccggatatgcctcggggctgtgatcctaataatcctggcggggtttctggcagaggactggcacagccggaggaagcgcctgcggcacaggggcagggctgtgcagaggccgcttccgcccctgccgcccctcccgcagacccggaaatcacacgggggtcaggatggaggccgacaggatgttcacagccgcgggttatgttcatgaccgctgaaccccaggcacggtcgtatccaagggagggatcatggcatgggaggcgactcaaagactggcgtgtgtggagcgtggaagcaggagggcagaggctacagctgtggaaacgaggccatgctgcctcctcctggtgttccatcagggagccgttcggccagtgtctgtctgtctgtctgcctctctgtctgagggcaccctccatttgggatggaaggaatctgtggagaccccatcctcctccctgcacactgtggatgacatggtaccctggctggaccacatactggcctctttcttcaacctctctaatatgggctccagacggatctctaaggttcccagctctcagggttgactctgttccatcctctgtgcaaaatcctcctgtgcttccctttggccctctgtgctcttgtctggttttccccagaaactctcaccctcactccatctcccactgcggtctaacaaatctcctttcgtctctcagaacgggtcttgcaggcagtttgggtatgtcattcattttccttagtgtaaaactagcacgttgcccgcttcccttcacattagaaaacaagatcagcctgtgcaacatggtgaaacctcatctctaccaacaaaacaaaaaaacacaaaaattagccaggtgtggtggtgcatccctatactcccagcaactcggggggctgaggtgggagaatggcttgagcctgggaggcagaggttgcagtgagctgagatcacaccactgcactctagctcgggtgacgaagcctgaccttgtctcaaaaaatacagggatgaatatgtcaattaccctgatttgatcatagcacgttgtatacatgtactgcaatattgctgtccaccccataaatatgtacaattatgtatacatttttaaaatcataaaaataagataatgcaccgtctccacccctctcatatttactttctgaaggaaatgttaggtcttctcaaggtaaagttctatatttattatagcgtttaggcatttcttgaccatctaatgagtgtaaaactgtaccactgggccaagtgcagtggatcatgtctgtaatcctagcactgtgggaggccaaggcaggaggatcgcttgagcccaggagttcaagaccagcctgggcaacatagtgagaccccatctctacttaaaataaagaagtaaaaattgttttaaaa

SEQ ID NO: 22504 - DNA, 3641 bp, Homo Sapiens
ctgcactgaagagggagagcgagagagagactggagacgcacagatccccccaaggtctcccaagcctaccgtcccacagattattgtacagagccccaaaaatcgaaacagaggaaacgaacagcagttgaacatggacgaaggaattcctcatttgcaagagagacagttactggaacatagagattttataggactggactattcctctttgtatatgtgtaaacccaaaaggagcatgaaacgagacgacaccaaggatacctacaaattaccgcacagattaatagaaaagaaaagaagagaccgaattaatgaatgcattgctcagctgaaagatttactgcctgaacatctgaaattgacaactctgggacatctggagaaagctgtagtcttggaattaactttgaaacacttaaaagctttaaccgccttaaccgagcaacagcatcagaagataattgctttacagaatggggagcgatctctgaaatcgcccattcagtccgacttggatgcgttccactcgggatttcaaacatgcgccaaagaagtcttgcaatacctctcccggtttgagagctggacacccagggagccgcggtgtgtccagctgatcaaccacttgcacgccgtggccacccagttcttgcccaccccgcagctgttgactcaacaggtccctctgagcaaaggcaccggcgctccctcggccgccgggtccgcggccgccccctgcctggagcgcgcggggcagaagctggagcccctcgcctactgcgtgcccgtcatccagcggactcagcccagcgccgagctcgccgccgagaacgacacggacaccgacagcggctacggcggcgaagccgaggcccggccggaccgcgagaaaggcaaaggcgcgggggcgagccgcgtcaccatcaagcaggagcctcccggggaggactcgccggcgcccaagaggatgaagctggattcccgcggcggcggcagcggcggcggcccggggggcggcgcggcggcggcggcagccgcgcttctggggcccgaccctgccgccgcggccgcgctgctgagacccgacgccgccctgctcagctcgctggtggcgttcggcggaggcggaggcgcgcccttcccgcagcccgcggccgccgcggcccccttctgcctgcccttctgcttcctctcgccttctgcagctgccgcctacgtgcagcccttcctggacaagagcggcctggagaagtatctgtacccggcggcggctgccgccccgttcccgctgctataccccggcatccccgccccggcggcagccgcggcagccgccgccgccgctgccgccgccgccgccgcgttcccctgcctgtcctcggtgttgtcgccccctcccgagaaggcgggcgccgccgccgcgaccctcctgccgcacgaggtggcgccccttggggcgccgcacccccagcacccgcacggccgcacccacctgcccttcgccgggccccgcgagccggggaacccggagagctctgctcaggaagatccctcgcagccaggaaaggaagctccctgaatccttgcgtcccgaaggacggaggttcaagcagagtgagaagttaaaatacccttaaggaggttcaagcagagtgagaagttaaaatacccttaaggtctttaagggaggaagtgtaatagatgcacgacaggcataaacaagaacaacaaaacaggtgttatgtgtacattcggagttcctgttttgctcatcccgcaccaccccaccctccacacactaacatccctttcttccccccaccagctgtaaaagatcctatgcgaaagacactggctcttttttttaatcccccaaataaattttgcccccttttaggccatgttccattatctcttaaaattggaacctaattcgagaggaagtaagaagggtctgttctgtggctgagctaggtgaaccccggggtaggggaaagatgttaacacctttgacgtctttggagttgacatggaacagcaggtagttgttatgtagagctagttctcaaagctgccctgcctgttttaggaggcgttccacaaacagattgaggctctttttagaattgaatttactcttcagtattttctaatgttcagctttctaaaaggcatatatttttcaaagaagtgaggatgcagtttctcacgttgcaacctattctgaagtggtttaaatggtatctcttagtaacttgcactcgttaaagaaacacggagctgggccatcgtcagaactaagtcagggaaggagatggatgagaaggccagaatcattcctagtacatttgctaacactttattgagaaattgaccatgaattaatggactcatcttaatttcttctaagtccatatatagatagatatctatctgtacagatttctatttatccatagataggtatctatacatacacatctcaagtgcatctattcccactctcattaatccatcatgttcctaaatttttgtaatcttactgtaaaaaaaagtgcactgaacttcaaaacaaaacaaaaaacaacaacaacaaaaaacaagtccaaactgatatatcctatattctgttaaaattcaaaagtgaacgaaagcatttaactggccagttttgattgcaaatgctgtaaagatatagaatgaagtcctgtgaggccttcctatctccaagtctatgtattttctggagaccaaaccagataccagataatcacaaagaaagcttttttaataaggcttaaaccaagaccttgtctagatatttttagtttgttgccaaggtagcactgtgagaaatctcacttggatgttatgtaaggggtgagacacaacagtctgactatgagtgaggaaaatatctgggtcttttcgtcagtttggtgcatttgctgctgctgttgctactgtttgcctcaaacgctgtgtttaaacaacgttaaactcttagcctacaaggtggctcttatgtacatagttgttaatacatccaattaatgatgtctgacatgctatttttgtagggagaaaatatgtgctaatgatattttgagttaaaatatcttttggggaggatttgctgaaaagttgcacttttgttacaatgcttatgcttggtacaagcttatgctgtcttaaattattttaaaaaaattaaatactgtctgtgagaaaccagctggtttagaaaagtttagtatgtgacgataaactagaaattacctttatattctagtattttcagcactccataaattctattacctaaatattgccacactattttgtgatttaaaaattcttactaaggaataaaaactttaatatacgatatgatattgtctaataattaaaaaagacataatggatgctcaattagttttaagatatctataactatagggatacaaatcactacagttctcagatttacaccttttttttgtcattggcttgatgtcacacatttccaatctcttgcaagcctccaggctctggctttgtctacctgctcgttcccaatgtatcttaatgaaaagtgcaaaagaaaaacctaccaattaaaaaaaaaaaaaaaaaa

SEQ ID NO: 22505 - DNA, 6765 bp, Homo Sapiens
cccaagtttggggaagacaggaactgcagcgcccctccccgtttcacgccacgcgcgggaccgaggacctaggacctggccagctgggcgtggttcggagagccgggcgggaaaacgaaaccagaaatccgaaggccgcgccagagccctgcttccccttgcatctgcgccgggaggccatggacttgtacagcaccccggccgctgcgctggacaggttcgtggccagaaagctgcagccgcggaaggagttcgtagagaaggcgcggcgcgctctgggcgccctggccgctgctctgagggagcgcgggggccgcctcggtgctgctgccccgcgggtgctgaaaactgtcaagggaggctcctcgggccggggcacagctctcaagggtggctgtgattctgaacttgtcatcttcctcgactgcttcaagagctatgtggaccagagggcccgccgtgcagagatcctcagtgagatgcgggcatcgctggaatcctggtggcagaacccagtccctggtctgagactcacgtttcctgagcagagcgtgcctggggccctgcagttccgcctgacatccgtagatcttgaggactggatggatgttagcctggtgcctgccttcaatgtcctgggtcaggccggctccggcgtcaaacccaagccacaagtctactctaccctcctcaacagtggctgccaagggggcgagcatgcggcctgcttcacagagctgcggaggaactttgtgaacattcgcccagccaagttgaagaacctaatcttgctggtgaagcactggtaccaccaggtgtgcctacaggggttgtggaaggagacgctgcccccggtctatgccctggaattgctgaccatcttcgcctgggagcagggctgtaagaaggatgctttcagcctagccgaaggcctccgaactgtcctgggcctgatccaacagcatcagcacctgtgtgttttctggactgtcaactatggcttcgaggaccctgcagttgggcagttcttgcagcggcagcttaagagacccaggcctgtgatcctggacccagctgaccccacatgggacctggggaatggggcagcctggcactgggatttgctagcccaggaggcagcatcctgctatgaccacccatgctttctgagggggatgggggacccagtgcagtcttggaaggggccgggccttccacgtgctggatgctcaggtttgggccaccccatccagctagaccctaaccagaagacccctgaaaacagcaagagcctcaatgctgtgtacccaagagcagggagcaaacctccctcatgcccagctcctggccccactggggcagccagcatcgtcccctctgtgccgggaatggccttggacctgtctcagatccccaccaaggagctggaccgcttcatccaggaccacctgaagccgagcccccagttccaggagcaggtgaaaaaggccatcgacatcatcttgcgctgcctccatgagaactgtgttcacaaggcctcaagagtcagtaaagggggctcatttggccggggcacagacctaagggatggctgtgatgttgaactcatcatcttcctcaactgcttcacggactacaaggaccaggggccccgccgcgcagagatccttgatgagatgcgagcgcacgtagaatcctggtggcaggaccaggtgcccagcctgagccttcagtttcctgagcagaatgtgcctgaggctctgcagttccagctggtgtccacagccctgaagagctggacggatgttagcctgctgcctgccttcgatgctgtggggcagctcagttctggcaccaaaccaaatccccaggtctactcaaggctcctcaccagtggctgccaggagggcgagcataaggcctgcttcgcagagctgcggaggaacttcatgaacattcgccctgtcaagctgaagaacctgattctgctggtgaagcactggtaccgccaggttgcggctcagaacaaaggaaaaggaccagcccctgcctctctgcccccagcctatgccctggagctcctcaccatctttgcctgggagcagggctgcaggcaggattgtttcaacatggcccaaggcttccggacggtgctggggctcgtgcaacagcatcagcagctctgtgtctactggacggtcaactatagcactgaggacccagccatgagaatgcaccttcttggccagcttcgaaaacccagacccctggtcctggaccccgctgatcccacctggaacgtgggccacggtagctgggagctgttggcccaggaagcagcagcgctggggatgcaggcctgctttctgagtagagacgggacatctgtgcagccctgggatgtgatgccagccctcctttaccaaaccccagctggggaccttgacaagttcatcagtgaatttctccagcccaaccgccagttcctggcccaggtgaacaaggccgttgataccatctgttcatttttgaaggaaaactgcttccggaattctcccatcaaagtgatcaaggtggtcaagggtggctcttcagccaaaggcacagctctgcgaggccgctcagatgccgacctcgtggtgttcctcagctgcttcagccagttcactgagcagggcaacaagcgggccgagatcatctccgagatccgagcccagctggaggcatgtcaacaggagcggcagttcgaggtcaagtttgaagtctccaaatgggagaatccccgcgtgctgagcttctcactgacatcccagacgatgctggaccagagtgtggactttgatgtgctgccagcctttgacgccctaggccagctggtctctggctccaggcccagctctcaagtctacgtcgacctcatccacagctacagcaatgcgggcgagtactccacctgcttcacagagctacaacgggacttcatcatctctcgccctaccaagctgaagagcctgatccggctggtgaagcactggtaccagcagtgtaccaagatctccaaggggagaggctccctacccccacagcacgggctggaactcctgactgtgtatgcctgggagcagggccggaaggactcccagttcaacatggctgagggcttccgcacggtcctggagctggtcacccagtaccgccagctctgtatctactggaccatcaactacaacgccaaggacaagactgttggagacttcctgaaacagcagcttcagaagcccaggcctatcatcctggatccggctgacccgacaggcaacctgggccacaatgcccgctgggacctgctggccaaggaagctgcagcctgcacatctgccctgtgctgcatgggacggaatggcatccccatccagccatggccagtgaaggctgctgtgtgaagttgagaaaatcagcggtcctactggatgaagagaagatggacaccagccctcagcatgaggaaattcagggtcccctaccagatgagagagattgtgtacatgtgtgtgtgagcacatgtgtgcatgtgtgtgcacacgtgtgcatgtgtgtgttttagtgaatctgctctcccagctcacacactcccctgcctcccatggcttacacactaggatccagactccatggtttgacaccagcctgcgtttgcagcttctctgtcacttccatgactctatcctcataccaccactgctgcttcccacccagctgagaatgccccctcctccctgactcctctctgcccatgcaaattagctcacatctttcctcctgctgcaatccatcccttcctcccattggcctctccttgccaaatctaaatactttatatagggatggcagagagttcccatctcatctgtcagccacagtcatttggtactggctacctggagccttatcttctgaagggttttaaagaatggccaattagctgagaagaattatctaatcaattagtgatgtctgccatggatgcagtagaggaaagtggtggtacaagtgccatgattgattagcaatgtctgcactggatatggaaaaaagaaggtgcttgcaggtttacagtgtatatgtgggctattgaagagccctctgagctcggttgctagcaggagagcatgcccatattggcttactttgtctgccacagacacagacagagggagttgggacatgcatgctatggggaccctcttgttggacacctaattggatgcctcttcatgagaggcctccttttcttcaccttttatgctgcactcctcccctagtttacacatcttgatgctgtggctcagtttgccttcctgaatttttattgggtccctgttttctctcctaacatgctgagattctgcatccccacagcctaaactgagccagtggccaaacaaccgtgctcagcctgtttctctctgccctctagagcaaggcccaccaggtccatccaggaggctctcctgacctcaagtccaacaacagtgtccacactagtcaaggttcagcccagaaaacagaaagcactctaggaatcttaggcagaaagggattttatctaaatcactggaaaggctggaggagcagaaggcagaggccaccactggactattggtttcaatattagaccactgtagccgaatcagaggccagagagcagccactgctactgctaatgccaccactacccctgccatcactgccccacatggacaaaactggagtcgagacctaggttagattcctgcaaccacaaacatccatcagggatggccagctgccagagctgcgggaagacggatcccacctccctttcttagcagaatctaaattacagccagacctctggctgcagaggagtctgagacatgtatgattgaatgggtgccaagtgccagggggcggagtccccagcagatgcatcctggccatctgttgcgtggatgagggagtgggtctatctcagaggaaggaacaggaaacaaagaaaggaagccactgaacatcccttctctgctccacaggagtgtcttagacagcctgactctccacaaaccactgttaaaacttacctgctaggaatgctagattgaatgggatgggaagagccttccctcattattgtcattcttggagagaggtgagcaaccaagggaagctcctctgattcacctagaacctgttctctgccgtctttggctcagcctacagagactagagtaggtgaagggacagaggacagggcttctaatacctgtgccatattgacagcctccatccctgtcccccatcttggtgctgaaccaacgctaagggcaccttcttagactcacctcatcgatactgcctggtaatccaaagctagaactctcaggaccccaaactccacctcttggattggccctggctgctgccacacacatatccaagagctcagggccagttctggtgggcagcagagacctgctctgccaagttgtccagcagcagagtggccctggcctgggcatcacaagccagtgatgctcctgggaagaccaggtggcaggtcgcagttgggtaccttccattcccaccacacagactctgggcctccccgcaaaatggctccagaattagagtaattatgagatggtgggaaccagagcaactcaggtgcatgatacaaggagaggttgtcatctgggtagggcagagaggagggcttgctcatctgaacaggggtgtatttcattccaggccctcagtctttggcaatggccaccctggtgttggcatattggccccactgtaacttttgggggcttcccggtctagccacaccctcggatggaaagacttgactgcataaagatgtcagttctccctgagttgattgataggcttaatggtcaccctaaaaacacccacatatgcttttcgatggaaccagataagttgacgctaaagttcttatggaaaaatacacacgcaatagctaggaaaacacagggaaagaagagttctgagcagggcctagtcttagccaatattaaaacatactatgaagcctctgatacttaaacagcatggcgctggtacgtaaatagaccaatgcagttaggtggctctttccaagactctggggaaaaaagtagtaaaaagctaaatgcaatcaatcagcaattgaaagctaagtgagagagccagagggcctccttggtggtaaaagagggttgcatttcttgcagccagaaggcagagaaagtgaagaccaagtccagaactgaatcctaagaaatgcaggactgcaaagaaattggtgtgtgtgtgtgtgtgtgtgtgtttaatttttaaaaagtttttattgagatacaagtcaataccataaagctctcacccttctaaagtgtacaattcagtggtgtgagtatattcataagatttatacttggtgtctattcataagacttatatccagcatattcataactagagccatatcacagatgcattcatcataataattccagacattttcatcaccctaaaaggaaaccctgaaacccattagcagtcattccccattcctccaacccattctctccctaatccctagaaaccaccaatctgctgtgtatttcatctattgccaacatttcatataaatggcatcatacaaaaaaaaaaaaaaaaaaaaaaaaaaaaaaaaaaaaaaaaaaaaaaaaaaaaaaaaaa

SEQ ID NO: 22506 - DNA, 2404 bp, Homo Sapiens
cacgcgtaagcttgggcccctcgagggatcctctagagcggccgccgagacgtccccggcacgctgatggagcccgggcgcggcgcggggcccgcgggcatggcggagcctcgggcgaaggcggcgcggccggggccccagcgctttctgcggcgcagcgtggtagagtcggaccaggaggagccgccgggcttggaggcagccgaggcgccgggcccgcagcccccgcagcccctgcagcgccgggtgcttctgctctgcaagacgcgccgcctcatcgcggagcgcgcccgcggacgccccgccgcccccgcgcccgcagcgctggtagcgcagccgggagcccccggagcccccgcggacgccggccccgagcccgtgggcacgcaggagcccggcccggaccccatcgcagccgctgtcgaaaccgcgcctgcccccgacggcggccccagggaggaggcggcggctaccgtgaggaaggaggatgagggggcggccgaggcgaagcctgagcccgggcgcactcgccgggacgagcccgaagaggaggaggacgacgaggacgacctcaaggccgtggccacctctctggacggccgcttcctcaagttcgacatcgagctgggccgcggttccttcaagacggtctacaaggggctggacacggagacctgggtggaggtggcctggtgtgagctgcaggaccggaagctcaccaagctggagcggcagcggttcaaggaagaggctgagatgctgaaaggcctgcagcaccccaacatcgtgcgcttctacgacttctgggagtccagcgccaagggcaagcggtgcattgtgctggtgacggagcttatgacctcagggacgctgaagacatacctgaagcggttcaaggtgatgaagcccaaggttctccgcagctggtgccggcagatcctgaagggcctgctgttcctgcacacaaggacgccacccatcatccaccgagacctgaaatgtgacaatattttcatcaccggaccaactgggtctgtgaagattggcgacttgggcctggccactctgaaaagagcgtcatttgccaaaagtgtgataggtactcccgagttcatggcgcccgagatgtacgaggagcactacgatgagtccgtggacgtctatgcctttgggatgtgcatgctggagatggccacctcggagtacccctactcggagtgccagaatgcggcccagatctaccgcaaggtcacctgtggtatcaagccggccagctttgagaaagtgcacgatcctgaaatcaaggagattattggggagtgtatctgcaaaaacaaggaggaaaggtacgagatcaaagacctgctgagccacgccttcttcgcagaggacacaggcgtgagggtggagctcgcggaggaggaccacggcaggaagtccaccatcgccctgaggctctgggtggaagaccccaagaaactgaagggaaagcccaaggacaatggagccatagagttcaccttcgacctggagaaggagacgccggatgaagtggcccaagagatgattgagtctggattcttccacgagagtgacgtcaagatcgtggccaagtccatccgtgaccgcgtggccttgatccagtggcggcgggagaggatctggcccgcgctgcagcccaaggagcagcaggatgtgggcagcccggacaaggccaggggtccgccggtgcccctgcaggtccaggtgacctaccatgcacaggctgggcagcccgggccaccagagcccgaggagccggaggccgaccagcacctcctgccacctacgttgccgaccagcgccacctccctggcctcggacagcaccttcgacagcggccagggctctaccgtgtactcagactcgcagagcagccagcagagcgtgatgcttggctcccttgccgacgcagcgccgtccccggcccagtgtgtgtgcagcccccctgtgagcgaggggcccgtcctgccgcagagcctgccctcgctgggggcctaccagcagcccacggctgcacctcctccgctggcccagccgacacccctgccgcaggtcctggccccacagcccgtggtccccctccagccggttcccccccacctgccaccgtacctggctccagcctcccaggtgggggcccccgctcagctgaagcccctccagatgccacaggcgcccctgcagccgcttgctcaagtccctccgcagatgcccccgattcctgttgtgccccccatcacgcccctggcgggaatcgacggcctccctccggccctcccagacctgccgaccgcgactgtgcctcccgtgccaccacctcagtatttctctccagccgtgatcttgccgagccggacgcgtg

SEQ ID NO: 22507 - DNA, 4602 bp, Homo Sapiens
ggggaagatggcggctgctcctttggaggagcgggattgagaggatcggggtggggagaccaaacaagagagacatttctggctctgaaggcgaacgcttcgctggccatttaggagctctgctcaaagccagacgtatcctagaaggaaaacatcaccatggctacagaaattggttctcctcctcgttttttccatatgccaaggttccagcaccaggcacctcgacagctgttttataagcgacctgattttgcacaacagcaagcaatgcaacagcttacttttgatggaaaacgaatgagaaaagctgtgaaccgaaaaaccatagactacaatccatctgtaattaagtatttggagaacagaatatggcaaagagaccagagagatatgcgggcaattcagcctgatgcaggttattacaatgatctggtcccacctataggaatgttgaataatcctatgaatgcagtaacaacaaaatttgttcggacatcaacaaataaagtaaagtgtcctgtatttgttgttaggtggactccagaaggaagacgcttggtcactggagcttctagtggggagtttaccctgtggaatggactcactttcaattttgaaacaatattacaggctcacgacagcccagtgagggccatgacgtggtcacataatgacatgtggatgttgacagcagaccacggaggatatgtgaaatattggcagtcgaacatgaacaacgtcaagatgttccaggcacataaggaggcgattagagaggccagtttctcacccacggataataaatttgctacatgctctgatgacggcactgttagaatctgggactttcttcgttgccatgaggaaagaattctccgagggcatggtgctgatgtgaaatgtgtagactggcatccaaccaaagggttagttgtttcaggaagtaaagatagtcaacagccaatcaagttctgggatcccaagactgggcagagtcttgcaacacttcatgcccataaaaacacagtaatggaagtgaaattaaacctcaatggcaattggctactcacagcatcacgtgatcatctctgtaaactttttgatatcagaaacctaaaagaagagcttcaagtcttccgaggtcataagaaagaagccacagctgtggcctggcatcctgttcatgaaggactttttgccagtggagggtctgatggttctttgttattctggcatgttggggtagagaaggaagtgggtgggatggagatggctcacgaagggatgatctggagtctggcttggcatcctcttgggcatattctctgctcaggctcaaatgaccatactagcaaattctggactcgaaaccgaccaggtgataaaatgcgagatcgatataatctaaaccttttacctggaatgtctgaagatggagtagaatatgatgacctcgaacctaatagcctggcagtaattccaggaatgggaataccagaacaactaaaattagctatggaacaagaacagatggggaaagatgaatcaaatgaaattgaaatgacaattccaggtttagattggggaatggaggaagtgatgcaaaaggatcagaaaaaagtacctcagaagaaagttccttatgcaaaacccattcctgctcagttccagcaggcttggatgcaaaataaagttccaattcctgctccaaatgaggtgctgaatgacagaaaagaagacattaaattggaagagaagaaaaaaacacaagcagaaattgagcaagaaatggctacattacaatatactaacccacaacttctggagcaacttaaaattgaaagacttgcacagaaacaagttgagcaaattcagcctcctccctcatctggcacccctctcctcggaccccagccttttccaggacaaggtccaatgtctcagattcctcaaggttttcaacagccccatccatctcagcagatgccaatgaacatggctcaaatggggcctccaggtccacagggacagtttaggcctcctggaccccagggacaaatgggaccacaaggtcctccactgcatcagggaggtggggggccacaaggattcatgggaccacaggggccccagggcccgccccaggggttgccacggcctcaggacatgcatgggccccaaggaatgcagaggcatcctggacctcatggccctttgggacctcaagggccacctggaccacaaggtagttctggtcctcaaggtcatatgggtcctcagggtccacctggcccacagagtcacataggcccccaaggcccgcctggccctcagggtcacttgggcccacaggggcctccgggtactcaaggtatgcagggaccacctggtcccagaggaatgcaagggcctcctcatcctcatgggatccaaggcggaccagggtctcaagggatccaaggtcctgtgtctcagggacctctgatgggattgaatccaagaggaatgcaggggcctccaggcccccgggagaaccagggtcctgctccccaagggatgattatgggccacccgcctcaagagatgagaggacctcaccctccaggtggactactgggacacggccctcaggaaatgagaggtcctcaggagatccgaggcatgcaggggcctccaccccaaggatcaatgctgggacctccccaggaattgcgagggcctccaggctcacaaagtcagcaggggccgccccagggctctttaggacctccaccccagggtggcatgcaaggaccccccggacctcagggacagcagaacccagcaagagggccacatccatctcaagggccaataccattccagcaacagaaaacgcctctgctaggtgatgggccccgggcccccttcaaccaggaaggacagagcacaggccccccacccctgataccaggcctagggcagcagggagcacaaggtcgcattccccctctgaaccccggacaaggacctggccccaacaaaggtgactcccgcggccctccaaaccatcacatgggcccgatgtcagagaggcggcatgagcagagcggcgggcctgagcatgggcccgagagggggcctttccggggtggccaggactgcaggggtccccctgataggcgtggccctcacccagacttccccgatgacttcagcagaccagatgacttccaccctgacaagcgctttggccaccggttacgtgaatttgaggggcgaggaggacctttaccgcaagaagagaagtggaggcgagggggccctgggcctccgtttccccctgatcacagggaattcagcgagggggatggccggggtgcagcccgaggccctccgggggcatgggaaggccgcaggcccggagatgaacgtttcccccgggatcccgaggacccacgttttcgagggcgcagagaagaaagtttcagaagaggagccccgccgaggcatgagggccgtgctccccccagaggaagggatggttttcctggtcctgaagactttggtccagaggagaattttgatgcttctgaggaagcggcccgaggacgagatctcagaggtcgaggtcggggtaccccacgaggaggaaggaagggtttacttcccactcctgacgagttccctcgctttgaaggagggcggaagccagattcctgggatggaaacagagagcctgggccaggtcatgaacattttcgtgatactccccgccctgatcatccccctcacgacggtcattccccagccagcagagaacgctcctcttctctccaaggcatggacatggcatccctacctccccgaaagcgcccctggcatgatggcccaggcacttctgagcacagagagatggaggccccaggaggcccttctgaagaccgaggaggcaaaggccgagggggcccaggacctgctcagagagtgcccaaatctgggcgttccagctccttagacggagagcaccacgatggataccacagagatgaaccttttgggggccctccaggcagtggcaccccttctcgagggggccggagtggcagtaactggggtagagggagtaacatgaactctggcccgccgaggcgaggagcttcacggggtggtggaaggggtcggtagaagctggaactgagtaccctgaggcctttttggacagtatgtaagaactttttgtggactcaccaagagaaacaaaaggaagcctgcaccattgtagccctgaacttttttttgggcacctgaatcccaggaaccctcaatgaggttttcaagatgaagagactgctgccagctaccagcctggctggccctgtcctgtccaccctcattgccccaactcccatgttgttttgtgaagataaaagctgggatctttttctttttttttaagtctcacaagacatggggcatttccacaaatttaagttcctgtccatttggaaatttgtttttatgtgtacagtttgtcagagaaaaacaaagtttttgtatgaatacagaatgtgatttacgcaagaaaaaaaaaaaaaaaaaaaaaaaaaaaaaaaaaaa

SEQ ID NO: 22508 - DNA, 2164 bp, Homo Sapiens
ggctcgagtgcctggcgggctctggcttccgcgtccgcccctgctccggcttcgcccgcagctccgcgcccgcgggcaaccaagcccccagcgaagcccgcacagctccgggtgccaggacggggggccatgccgtgccggagggaggaggaagaggaagccggcgaggaggcggagggggaggaagaggaggacgacagcttcctcctgctgcagcagtcggtgacgctgggcagctcgggcgaggtggaccggctggtggcccagatcggcgagacgctgcagctggacgcggcgcaggacagcccggcctcgccgtgcgcgcccccgggggtgccgctgcgggccccggggcccctggctgcggcggtgccggcggacaaggcccggcccccggcggtgccgctgctgctgccgcccgcttcggctgagacggtgggcccggcgccctctggggccctgcgctgcgccctaggggaccgcggccgcgtgcgcggacgcgctgcgccctactgcgtggcggaggtcgccgcaggccccagcgcgctgccggggccgtgccggcgaggatggctcagggacgcggtcacctcccgccgcttgcagcagcgccgatggacccaagccggggcacgcgccggcgacgacgacccgcatcggctcctccagcagctcgtgctctcgggaaacctcatcaaggaagccgtgcggagactccaacgagccgtcgccgcggttgcagccacgggccccgcaagcgcccctgggcccgggggaggccgcagcggacctgaccgcattgccctgcagccctcaggctccttgctctgacgcaggcctcctggaggaggaagtggaggccgctgcgtagacccaacagcgtccagttcctactaactctgagctgaagccgacgtcgccagcctgggagcgaccactttggctgcggggaggcgcgtggggagagatctcaaccagagaagttaccagccgcggcgaggccgtcggagaaaacttaagcgtggagaaatgtatgcgccagggtgcttccgtggggcatgagaatttcccgggccatccaagcccaaggacctgggataaactgggagaactatggcagctacttgcatcgacttgtacctcacttagcccttgggggcgtcgtgagcttggattgtttaaggagggctcaggggtaggaatcgcgatggctttataacaatacttgaaaactaacgacacgcatacattttcttattttctggtggaggagcttagtaagtggtgctacaattgctgtgcaaagaaattccagaggggagaagaatgtaaaagtttggtggtgggtggcttggcattgcccctttttcccaccgattcggtggctggtgaaggtgggagatgtgaactccaattaagggactggagagaggtgaagaattttgcaggtgggagatttggatttgaatgtggacttgtaaatgacttgaccttgccatctgtgttcaaggtcacggtttgctgtggggttcctgggagagcttactcaccccggagtcttttctttctcttgctccaagaagagccctgttggtgctttaccaccgcttggagtctcccgaggacacaaacaggcagagagggacgtgtagggagagttctttcctgttttctgtgctttcctttttacaggactcccggaaggccactcatggccatgccaggagctttctcagaaacagtcataaacgatctcttgagtctctttcttgtcctcccagctgagctttcttattccaccctttctggtgtctataggaatgcatgagagaccctggacgtttttctgctctcttctggccctccatggagccatgggcctcggcctcggcggctcctcaccctcacaatttatttcctcctcccgtgccagcccttcttttgtgtctgaaaccggttttaaaatgtgactctcccagagaagaagccgctggctgtatgaaacttgacggcgcttttgtaaggtgccacccccaaactttaaggtagctaaaccaatttttaaaagattcaatggcttgttcatcctccagatgtagctattgatgtacacttcgcaacggagtgtctgaaattgtggtggtcctgatttataggatttcat

SEQ ID NO: 22509 - DNA, 3623 bp, Homo Sapiens
ggtgaagaaatagggcctttccgcctgcgggcccagtgagtcgacacggtgggggcccgcgatccccggaacttaccactgaataaatccagtccagcgtgcgacgacttactggcttcatgataatggcatcagctgctaaggaatttaaaatggacaacttttcacctaaagctggcactagcaaattgcaacagacagtaccagctgatgcatctcctgattctaagtgtcctatatgcttggatagatttgataatgtgtcttacttagatcgctgcttacataagttctgttttcgctgtgtacaggagtggtcaaaaaacaaagctgaatgcccactatgtaaacagccctttgattctattttccattctgtgagggcagaagatgacttcaaggagtatgtcctaaggccttcgtataatggttcttttgtcacccctgatcgacgatttcgctaccgtacaactctgacaagggaacgaaacgcttctgtgtattcacctagtggtcctgtgaacagaagaacaacaactccaccggatagtggagtactgtttgaagggttaggcatttcaacaagacctagagatgttgaaattcctcagtttatgagacagattgcagtaaggaggccaactacggcagatgaaagatctttgcggaaaattcaagaacaagatattattaattttagacgaactctttatcgtgctggtgctcgagttagaaatattgaagatggtggccgctacagggatatttcagctgaatttttccgtagaaatccagcttgccttcacagattagtcccctggttaaaacgtgaacttacagttctttttggagctcatggatctttagtgaatattgtccagcatattatcatgagtaatgttactcgctatgacttggagagtcaggcatttgtgtctgatttaagaccatttttacttaatcgaactgagcattttatacatgaatttatcagttttgcccgatctccttttaacatggcagcctttgaccagcatgccaattatgattgccctgctccttcatacgaagaaggcagccattctgattcttcagtcataacaatatctccagatgaggctgagacccaagagctggatattaatgtagccactgttagtcaggcaccatgggatgatgaaactccaggaccatcttactcaagctcagagcaggtacacgttactatgtcttctcttttaaatacttctgacagttcagatgaagaacttgtcacaggaggagccacgtctcagatacaaggagtacaaaccaatgacgacctaaataatgacagtgatgattcttcagataattgtgtcattgttgggtttgttaaaccactagctgagaggaccccagaacttgttgaactgtcctctgattctgaggacttaggttcttatgagaaaatggagacagtgaagacacaagaacaggagcaatcttacagttctggtgatagcgatgttagtagatgctcatctccacactctgtccttggaaaggatgaacaaataaataaaggtcattgtgattctagtacaagaatcaaatcaaagaaggaagagaaacgatctacatcattgtcatctcccagaaacctgaactcatctgtaagaggagacagagtatattctccatataaccatagacacagaaagaggggaagatcaagaagttcagattcacgttctcagagtagaagtgggcatgatcagaagaatcatagaaagcatcatgggaagaaaagaatgaaaagtaaacgatccagaagcagggaaagtagcagacctagagggagaagagacaaaaagagatcaagaactagagatagcagttggtccagaagaagccaaactctgtctctaagtagtgaaagcacaagcagatcaaggtctcgtagcagtgatcatggtaaaagaagatcacggagcagaaatagagatcgttattatttaagaaataattatggaagcagatacaaatgggagtatacttattacagtagaaacaaggacagggatgggtacgaatcatcttacaggaggaggactctgtccagagctcattattctagacagtcttcaagtccagaatttagagttcagtccttttctgaaagaacaaatgctaggaaaaaaaataatcacagtgagaggaagtattactactatgaaaggcacagatcaaggagcctgtctagtaacagatcaaggactgcatctaccgggactgaccgggtgagaaatgaaaagcctggagggaaacgaaaatacaaaacacggcatttggagggtactaacgaagtggctcagccatctcgtgaatttgcttctaaagcaaaggacagtcattaccaaaaatcttcatcaaaattggatggaaactacaaaaatgagagtgataccttttcagacagccgatcatcagacagagagacaaaacacaaaaggagaaaaaggaagacccggagcctaagtgtagagatagtttatgaaggaaaagctactgatacaactaaacaccataaaaagaaaaagaagaaacataagaagaagcataagaaacaccatggagataatgcttcacgttccccagttgtaattaccattgacagtgacagtgataaggattctgaagtaaaggaggatacagaatgtgacaatagtggtcctcaagaccctctacaaaatgagtttttggctccttccttggaaccatttgaaactaaagatgtagttacaatagaagctgaatttggtgtgctggacaaggaatgtgatattgccacacttagtaacaacttgaataatgccaacaaaactgtagataatattccacctctggcagcttcagttgaacaaactctcgatgtaagagaagagagcacctttgtttctgatttggagaaccagcccagtaacattgtgtctcttcaaactgagccatcaaggcaattgccatcgccacggacatcattaatgtcagtatgtcttggtagagactgtgatatgtcttaaaactgccaaagcatttcattgagaattatgatgttataaaaaggaaaaaggaagaatgtcgtctactgcagtctatttaaagatgacatttggtgaaaactctcttcctccttacaatattttaaatgattttttttttggtgttaatttgtaaaaatcattatttgttcaaaatgtatgtcccaccctcaaagatatgcacttttaagtgaagaaaatgatactgctagcagcttatttaaaacttggggtcctttttaaataagaaaaattatataaattttagaagttatttcataaagccatacggtattgacatatttttaaggtagtcaatgagtatttttgaattttttttttttgagagttattctggaaatgtgttataagctaggagaatccctttggacagtctttatttttcttcttaaaaatttatatgattcaaaaccatttcttcaggttaaattgaggtattttaatctgcactgtttatcttctgccaaaataaaaatttactatttcctttatatacttgtttatctggactgccagtaaaac

SEQ ID NO: 22510 - DNA, 5205 bp, Homo Sapiens
gctctcgcggcagttcagacctcgtgctcgtccccttcgcctgtctgtgtgtggtatccgtaggtccggggcactttttttttggtgtgtgtgtgtgtgcgtgcgcgcgtgtgtgtgtgttgggtgtgtgtgttttgggggtttgccggggcgcggagaggagagccgggccgaggggaaggaaggaagccgtagagctccccggtctcgggctgcgtctcccctccagcgctctcctgcctgtgcgctccgacgcggcagcggcggtggcgctgagcgctcctcggtggggacgcggtgctcaagctgggagcagcgagaaccctttgcggaggcttcccgtgcccgctggacttaggatgccagggcgtttgatttgcacctactgagcccggagttcctccccggccctgggaagggcttgcagcggcggcggcggcggcggcagcggcagtagcagacggaacagcaggctctcctctccgagggggggcgtcgaagcgcccgcgccgggctcccgccctcaccctccggcgctcctgcggccccaagccaccacctcgtagcccgcctccttcctcttctcgccgcgagccccaggcccggacgcctctaggatcggacccgcgcgccccggatgcttggggctgccccggcgcgcccccctacaggcgcgacccgctgagtgacccggagggggcccgagctcgccccaggaggggcccccggcctcgggaccccgcgccggacctgctggggagccgacgatgtccgcgcagtcccaggcattgacgcgctcgacgcagcccagggaaggcggccggccgctgcccgccgagccctaggcgcacaaagcccgcgcccgccgcccggccccggcgcccgccgacgactttgccgcctgctccgcggctctttgtctccacttggggcgggcgcccgactctgggatttcgctgcgagaacgagctgggggggccgggggcgagctctcggtttcccggccgccccccgctcgggctcggctcccccctcccccgcacctccccggcccgggctctcggcgcttccacgctctcggaatcacgacccctccctgccatgtatccgcagggcagacatccggctccccatcaacccgggcagccgggatttaaattcacggtggctgagtcttgtgacaggatcaaagacgaattccagttcctgcaagctcagtatcacagcctcaaagtggagtacgacaagctggcaaacgagaagacggagatgcagcgccattatgtgatgtactatgagatgtcctatggcttgaacattgaaatgcacaagcagacagagattgcgaagagactgaacacaattttagcacagatcatgcctttcctgtcacaagagcaccagcagcaggtggcgcaggcagtggagcgcgccaagcaggtcaccatgacggagctgaacgccatcatcgggcagcagcagctccaggcgcagcacctctcccatgccacacacggccccccggtccagttgccaccccacccgtcaggtctccagcctccaggaatccccccagtgacagggagcagctccgggctgctggcactgggcgccctgggcagccaggcccatctgacggtgaaggatgagaagaaccaccatgaactcgatcacagagagagagaatccagtgcgaataactctgtgtcaccctccgaaagcctccgggccagtgagaagcaccggggctctgcggactacagcatggaagccaagaagcggaaggcggaggagaaggacagcttgagccgatacgacagtgatggggacaagagtgatgatctggtggtggatgtttccaatgaggaccccgcaacgccccgggtcagcccggcacactcccctcctgaaaatgggctggacaaggcccgtagcctgaaaaaagatgcccccaccagccctgcctcggtggcctcttccagtagcacaccttcctccaagaccaaagaccttggtcataacgacaaatcctccacccctgggctcaagtccaacacaccaaccccaaggaacgacgccccaactccaggcaccagcacgaccccagggctcaggtcgatgccggcctcggctctgcgcacgcccatctccatcaccagctcctatgcggcgcccttcgccatgatgagccaccatgagatgaacggctccctcaccagtcctggcgcctacgccggcctccacaacatcccaccccagatgagcgccgccgccgctgctgcagccgctgcctatggccgatcgccaatggtgagctttggagctgttggttttgaccctcaccccccgatgcgggccacaggcctcccctcaagcctggcctccattcctggaggaaaaccagcgtactcattccatgtgagtgctgatgggcagatgcagcccgtgcccttcccccacgacgccctggcaggccccggcatcccgaggcacgcccggcagatcaacacactcagccacggggaggtggtgtgtgccgtgaccatcagcaaccccacgaggcacgtctacacaggtggcaagggctgcgtgaagatctgggacatcagccagccaggcagcaagagccccatctcccagctggactgcctgaacagggacaattacatccgctcctgcaagctgctccctgatgggcgcacgctcatcgtgggcggcgaggccagcacgctcaccatctgggacctggcctcgcccacgccccgcatcaaggccgagctgacgtcctcggctcccgcctgttatgccctggccattagccctgacgccaaagtctgcttctcctgctgcagcgatgggaacattgctgtctgggacctgcacaaccagaccctggtcaggcagttccagggccacacagatggggccagctgcatagacatctcccatgatggcaccaaactgtggacagggggcctggacaacacggtgcgctcctgggacctgcgggagggccgacagctacagcagcatgacttcacttcccagatcttctcgctgggctactgccccactggggagtggctggctgtgggcatggagagcagcaacgtggaggtgctgcaccacaccaagcctgacaagtaccagctgcacctgcacgagagctgcgtgctctccctcaagttcgcctactgcggcaagtggttcgtgagcactgggaaagataaccttctcaacgcctggaggacgccttatggagccagcatattccagtctaaagaatcctcgtctgtcttgagttgtgacatttcagcggatgacaaatacattgtaacaggctctggtgacaagaaggccacagtttatgaggtcatctactaaacaagaactccagcagggctgtcaaactctgggagaaaccgactcggctctgacagggagacccccaggcgaggggccccgaggatggcggaggatgggccgcaggcagccgagcgttcagggctgcgctccggccggctgagagggcacgtgccccgtcacagtctggactcctgggcctggattgatgtgtctcacagactcggaagggttctgctcctcctcctccccctgaacaatgctggcagttgctacaaatagatttattggaggcttatggctccggttcccccacagacccgctcatgagtctctgtttgttcttcccttttcttttgccctgtccctcaccttgggtcgggggtgctggagtggaccacaatgttgtgctgggggatgggggggtctctctttgccgattgtgcagtgcacaagatttgtgaaaaatgtaaataacagactcctattgcggactgatcagtgggagaggaggccccttcccaccggaaactctgagtgtgtatttcgcctgctgtatttgtaatccactcgtggtggtggctttttttttttttttttttaaataaacagatgctctcacctgggaagaggagacagggaggggaaccaattgaagaaagaggagaaaagtcttagagtgtggaaaaggcaaccaggttggccgtaaggtgcctgctggaatgcgtgtgcctccacacgggtctgggcatccggactgataaccagccggccagactgagggatggaaggcactgagatgggggcccgtccaggcggacacccgcagaaatggagctttctgtggtctcttgcactctggctgcctcttgccctctctgtgtctctctttcttggtctctccctctctcctcctcagcctggtctttctctttggtgcacacttagttattgttgtgagcaatggaagttcaaaggaactccctctccagctcttctgaatcttgggacacagcctaaaaaggacaaaaagttagaagacagcatagcaactcagctcagggagctaccagagaaaaatagcaactgatgtgggtgcttttttttttttttaatttgaataaaaagaattagaagtgatgtccttttataaaatgccttctcccccttcccgcctacagtctcttcctctccccttagaggggggaaagtgtataaacctacagggttgtgagtctgaaaagaggatccccctcacccccaccctgggcagagcagtgggggttggggggtgggagagggggacacagatcctggcacactgtggatatttcttgcagattgcagtctcttgtggcccaaacaggttaggtagactatcgcctctggcaggtgccaccttttggtaccaacatgttctgaggtgttaggatttgggttgggttttttttgtttgtttttttttttccttttggtctttttttttttctccttttaaagaaaagctaaaggccgctgtgagtcctggtggcaggctctccatggatgtagcatatcgaagataatttttatactgcatttttatggattattttgtaatgtgtgattccgtctgctgaggaggtgggaggggctccagggaaagccacccaccttcagtgaggttgctccccagctgagcgcaccgggcatgggatgtggaggctggcgacacaccctgtgcctctccaaggctgggcgcgtggggcgtccagagtctctctgggtctcagatgtccatctgccacctcttgttaaggctctagccagaagggagggtgagggtagaagaaagttattctc

SEQ ID NO: 22511 - DNA, 7426 bp, Homo Sapiens
gggcagccacctcagtcagcccctaagattgttatccttaaggccccaccaagctcctcagtcactggtgcccatgtggcacaaattcaggcccaaggtatcaccagcacagctcagcccctggtggcaggcacagccaatggtggaaaagtcacttttaccaaagtgctaaccggcacaccccttcgaccaggtgtttccattgtctctggtaatacagtgttggccgccaaggtccctgggaaccaggctgctgttcagcgcattgtccagcccagccgaccagtaaagcagctggtcctccagccagttaagggttcagctcctgctggaaaccctggggccacagggcccccactgaagcctgcagttacactgacctctacacctacccagggtgaatcgaaacgcatcaccctggtcctccagcagccacagtctggaggtccccaaggacatcggcatgttgtgctagggagtctaccaggcaagatagtgttacagggcaaccagctggcagccctgactcaagccaagaatgcccaagggcagcctgccaaggtagtaactatccagctgcaggtgcagcagccacagcaaaaaatccagattgtaccacaaccaccatcatcgcagccacagccccagcagccaccctccacccagccagtgactctgtcctctgtacagcaggctcagataatgggaccaggacaaagcccaggacaaagactttcagtaccagtcaaggtggtactgcagccacaggctggctcttcccaaggggcctcttctgggctctctgtagttaaagttctgagtgccagtgaagtggcagctttgtcatcaccagcaagctctgctcctcattcggggggaaagacaggaatggaggaaaaccgcagattggaacaccagaagaagcaagagaaagcaaatcggattgtagcagaggccattgcgagagcccgtgcccgcggtgagcagaacatacctcgagtcttaaatgaggacgagttgcccagcgttcggccagaggaggaaggcgagaagaaacgcaggaagaagagtgctggggagaggctgaaagaggagaagccaaagaagagtaaaacatctggtgcctccaaaacaaagggcaagagcaagctcaacaccatcactcctgtagtgggtaagaagagaaaacgtaatacctcatctgataattcagatgtggaagtcatgcctgcacagtcacctcgagaagatgaagaaagcagcattcagaagagacgctcaaaccgccaagttaagcgaaaaaaatatacagaggacctggatataaagatcacagatgatgaagaagaagaagaggtggatgtaactggtccaataaaacctgagcctatcctccctgaaccagtgcaagaaccagatggcgagactttgccttccatgcagttctttgtggagaatcccagtgaagaagatgcagccattgtagacaaagtgctttctatgcggattgtgaagaaggagctcccttctggacaatatactgaagcagaagaattctttgtcaagtacaagaactactcctatctgcattgtgaatgggctactatctcccaactagagaaggataagaggatacatcaaaaattaaagcgcttcaaaaccaaaatggctcagatgagacacttcttccatgaggatgaagagccctttaatccagactacgtagaggtggataggatattggatgagtctcacagtattgacaaggacaatggggagcccgttatttactacctggtgaaatggtgctctctgccctatgaggatagcacatgggagctaaaagaagatgttgatgagggcaagattcgagaatttaaacggattcagtcaaggcacccagaactcaaaagggtgaatcgtccgcaggcaagtgcctggaagaaattggagctatcacatgaatataaaaacagaaaccagctacgggaatatcagttggaaggggttaattggctgctctttaattggtataacaggcagaactgcatcctggctgatgagatgggattgggcaaaactattcagtccattgccttcttgcaggaagtatataatgtgggcatccatggtcccttcttggtcattgccccactgtccacaattactaactgggagcgagaatttaatacatggacagaaatgaacactattgtgtaccatggcagtctggccagcaggcagatgattcaacagtatgaaatgtactgcaaagattcacggggacgcctcatcccaggcgcatacaagtttgacgctctgatcaccacttttgagatgattttgtcagattgtcctgagcttcgtgaaattgaatggcgttgtgttatcattgatgaagcccatcgactgaaaaaccgtaattgcaagctgcttgatagtctcaagcacatggacctggaacacaaggtgctactcacaggaacaccattgcaaaatactgtagaagaactgtttagcttgcttcatttcttggaaccgtcacaatttccctcagaatcagagtttctcaaggactttggggatctcaagacagaggaacaggttcaaaagctacaggccattcttaagccaatgatgctgagaagactcaaagaggatgttgaaaaaaacttggcacccaaacaggaaacaattattgaagtagagctgactaatatccagaagaaatactatcgggctattttggagaagaatttctccttcctttccaaaggggcaggtcataccaacatgcctaatctacttaacacaatgatggagttgcgcaagtgctgcaaccacccatatctcatcaatggtgctgaagaaaaaatcctaacagaattccgtgaagcttgccatattatacctcatgactttcacctgcaggccatggttcgttcagccggcaaactggttcttattgacaagttgcttccaaagcttaaagctggtggccataaagttctgatcttctctcagatggtacgctgcctagacatcctagaggattatttaatccagaggaggtacttatatgaacgtattgatgggcgagttagaggcaaccttcgacaggctgccattgaccgcttcagcaagcctgactcagaccgctttgtcttcttactgtgtacccgggctggtggacttggtattaatcttacagctgctgatacctgcatcatctttgattcagactggaatccacaaaatgacctgcaggcccaggcacgatgtcatcgaattgggcagagcaaagctgtgaaggtgtaccgcctcatcactcgtaattcctacgagagagagatgtttgataaggccagcctcaagttggggttggataaggctgtgcttcaatccatgagtggtcgggatggcaacattactggaatccaacagttctctaagaaggagattgaagatcttttaagaaaaggagcatatgcagccatcatggaggaagatgatgaaggctccaagttttgtgaagaggacattgaccagatcttgttaagacgaactacaaccatcaccattgaatctgaaggaaaaggttccacctttgctaaggcaagctttgttgcttctgaaaacaggacagatatttctttggatgaccccaacttttggcaaaagtgggccaaaaaggctgacctagacatggatctgctcaacagcaagaataatttggtaattgacacacctagagtacgaaaacaaacgcgccactttagcactctgaaagatgatgacctggtggaattctctgatttggaaagtgaggatgatgagcggccacgctcccgcagacatgaccgtcatcatgcctatgggcgcactgactgctttcgggtggaaaagcatctcctggtatatggttggggacgatggcgagatattttatctcatggacgcttcaagcgacgtatgactgaacgagatgtggagaccatttgtcgggccattctcgtgtactgtcttctacactaccgtggggatgaaaatattaaaggcttcatctgggacttgattagcccagctgaaaatggcaagacaaaagaattgcagaatcattcaggtctatctatccctgtgcctcgtggacgcaaaggaaaaaaagtaaagtcacaaagcacttttgatatccataaggcagattggatccggaaatataaccctgacactttgttccaagatgaaagttataagaagcacttgaaacatcagtgtaacaaggtactgttgcgggtacgaatgctatactacctgaggcaggaggttattggagaccaagcagaaaaggtgttagggggtgcgattgccagtgagattgacatatggttcccagtagtggatcaactggaggttccaacaacttggtgggacagtgaggctgacaagtcgctgctcattggagtctttaaacatggctatgagaaatataataccatgagggcagacccagccttatgtttcctagaaaaggctggccgaccagatgacaaagcaattgcagcagaacatcgagtgttggataacttctctgacatagtagaaggggttgactttgataaagattgtgaagatcctgaatataaaccactccaaggtcccccaaaggaccaagatgatgagggtgatcccttgatgatgatggatgaggagatctcagtgattgatggagatgaagcccaggtgacccaacagccaggccatttattctggcctccgggctctgccctaacagctaggcttcggcgtctagtaacagcgtatcagcgcagctacaagagagaacaaatgaagatagaggctgcagaacgtggggaccggcgaaggcggcgttgtgaagcagccttcaagctgaaagaaattgcacggcgggagaaacaacaacgatggacaaggcgtgaacaaactgatttttatcgagtggtgtctacgtttggtgtggaatatgaccctgacaccatgcagttccattgggatcgcttccgcacttttgctcgactagacaaaaagacagatgaaagccttaccaagtacttccatggctttgtggccatgtgccgccaagtatgccgccttcccccagcagctggagatgaaccccccgaccctaacctgttcattgagcccatcactgaggagagagcctcacggactctctaccgtatagaattgcttcggcgcttacgggaacaagttttatgccacccccttttggaagatcggctggcattgtgtcagcctcctggtcctgaattgcccaaatggtgggagcctgttcggcatgatggggagcttctaagaggggcagcccgccatggggtgagccaaacagactgcaacatcatgcaggacccagacttctcttttctggctgcccgtatgaattatatgcagaaccatcaagcaggagcaccagctccatccttgtcacgctgctctactccactgctgcaccagcagtatacctcacgcactgcctcaccactgcccctgcgcccagatgctcctgttgaaaagtcacccgaggagacagctacccaggtccccagtctggagagtctgactttaaagctagagcacgaggtggtggccaggagccgaccaaccccacaagactatgagatgcgagtatccccctctgatactacccctctggtttcccggagtgttccaccagtcaaactggaggatgaggatgattcggactctgagctggacttgagcaagctgtcaccatcttcttcttcttcctcatcctcatccagctccagctccagcactgatgagagtgaggatgagaaggaagagaagctaactgaccagtcccgctcaaagctctatgatgaagagagtctcctgtccctcactatgtcccaagatggattcccaaatgaagatggagaacaaatgacccctgagcttctgctactgcaggaaagacaaagagcctctgagtggcccaaggatcgtgtcctgataaaccgtattgacctcgtctgccaggctgtactctcagggaagtggccttctagccgtaggagccaggaaatggtaacaggaggaattttggggccaggcaaccacttgctagacagtccctcattgactcctggagaatatggtgactctccagtccccacaccacgaagtagtagtgcagcttccatggcagaggaggaagcatctgcagtcagcacagcggcagcccagttcaccaaacttcgccgaggcatggatgaaaaggagtttacagttcaaatcaaagatgaggaaggattgaagttaacattccagaagcacaagttgatggcgaatggagtaatgggagatggacatccactgtttcataagaagaaggggaacagaaagaagctagtagagctggaggtggagtgcatggaagagcctaatcaccttgatgtggacctggagacccggatccctgtcatcaataaggtggatggtactttgctggtgggtgaggatgcccctcgccgggctgaactggagatgtggttacagggtcatccagagtttgctgttgatccccgatttctagcgtatatggaggatcgcagaaaacagaagtggcaaagatgtaaaaaaaataataaggcagaattgaactgtttgggaatggaaccagtacagacagctaactctagaaatgggaaaaagggtcatcacactgaaacggtgttcaaccgggttttgccagggcctattgcaccagagagcagcaagaagcgggcccgtaggatgcgaccagacctttctaagatgatggccctcatgcagggtggaagcactgggtctctatctctgcataacacgttccaacacagcagtagtggcctacagtctgtgtcatctttgggtcacagcagtgccacttctgcatctttgccttttatgccatttgtgatgggtggtgcaccatcatcccctcatgtagactccagcaccatgcttcatcaccaccaccaccacccccacccccaccatcaccaccatcaccatccaggcttgagagcccctggctacccctcttcaccagtgactaccgcctctggtactaccttgcggttgccaccactgcaacctgaggaggatgacgatgaggatgaagaagatgatgatgacttatctcagggctatgatagctcagaaagggacttctcactcattgatgatcctatgatgccagctaactcagactccagtgaagatgctgatgactgaagccccagcatgggccccattgcttgggcggctgctgtattttcatttactctggcccttggactatggaaacgtgggaggggcaggggagatgtggggaagtccaggactccaggaggtgaaaagg

SEQ ID NO: 22512 - DNA, 5584 bp, Homo Sapiens
gtcccatactgttttcattgactaccaagaaaaggaaagaacagacagacctaactttgaactatcccaaaggaaaagcctaggaacaccaacagtgatatgtactcctactgaggagagtgttttctttccaggaaatggtgaaagtgaccgtctagtagcaaatgacagccagctaacccctctggaggaatggtctaataataggggccctgtagaggtagctgataacatggaattgtctaaatcagccacttgcaaaaacatcaaagatgtacaaagtcctggatttctgaatgaacctctatcaagcaaaagtcagagaagaaaaagccttaagctaaaaaatgacaagaccattgtattttcagagaatcataaaaatgatatggatattacccagagttgtatggtggaaatagataacgaaagtgccctggaggataaagaggacttccatttggcaggggcttctaaaactattttgtattcatgtgggcaggatgacatggagatcactaggagtcacacaactgccttagaatgtaaaactctcctgccaaacgaaatagctattaggcccatggacaaaaccgtattgttcacagataattacagtgatctggaagtcaccgattcccatactgttttcattgactgtcaagccacagagaaaatacttgaagaaaaccctaaatttggaataggaaaaggaaaaaacttgggtgtttcctttcctaaggataatagctgtgttcaagaaatcgctgaaaaacaagcactggctgtaggaaacaaaatagttcttcacaccgagcaaaagcaacaactctttgctgctactaatagaactactaatgaaatcatcaaatttcatagtgctgctatggatgaaaaggtcatagggaaagttgtagaccaggcctgtacattggaaaaagcgcaagttgaaagctgtcagttaaataatagagatagaagaaatgtggactttacaagtagtcatgcaactgctgtttgtggatccagtgataattattcctgtttaccaaatgttatttcctgtactgataatttggagggtagtgccatgctcttatgtgataaagatgaggaaaaagccaattattgcccagtgcaaaatgatcttgcttatgcaaatgattttgccagtgaatattacttggaatctgagggacagcctctctctgctccttgtcctttgttagagaaggaagaagttattcaaaccagtaccaaaggacagttagactgtgttataacactgcacaaagatcaagatctgattaaggatccacgaaatctattggctaatcaaactttagtatatagtcaagatctgggggagatgactaaacttaattcaaagcgagtatcttttaagcttccaaaggatcaaatgaaagtctatgttgatgacatttatgttattcctcagcctcatttctcaaccgaccaacctccattacctaaaaaaggacagagtagtatcaataaagaagaagtaatactgtctaaagctggaaataagagtttaaatattatagaaaattcctctgcacccatatgtgaaaacaagcccaaaatactcaatagtgaggaatggtttgctgcagcctgtaaaaaagaactgaaggaaaatattcaaacaactaactataatacagctctagatttccacagtaactcagacgtaactaagcaagtcattcaaactcatgtcaatgctggagaagcaccagatcctgtaattacatctaatgttccatgttttcatagtatcaaaccaaatctgaataatttgaatggaaaaactggagagtttttagcctttcaaactgttcatctaccaccccttccagagcaattacttgaattaggaaataaggcacacaatgatatgcatatagtgcaagctacagaaatacataatattaacataatctccagcaatgctaaagatagtagagatgaggaaaataaaaagtctcataatggagctgaaaccacctctctaccgccaaagacagtttttaaagataaagtaaggagatgttctttgggaatctttttgcctagattgcccaacaagagaaattgtagtgtcactggtattgatgacctggaacagattccagcagacacaactgatataaatcacttagaaactcagccggtctctagcaaagattcaggcattggatctgttgcaggtaaactgaacctaagtccttctcaatatataaatgaggaaaatcttcctgtatatcctgatgagatcaattcttcagactctattaacatagaaactgaggaaaaggccttgattgagacataccaaaaagagatttcaccatatgaaaataaaatgggaaaaacttgcaatagccaaaaaagaacgtgggtacaagaagaagaagatattcataaggagaaaaaaatcagaaaaaatgagattaagtttagtgatacgacacaagatcgggagatttttgatcaccatactgaagaggatatagataaaagtgctaacagtgtattgataaaaaacctgagcaggaccccatctagttgcagcagctctctggattcaatcaaggctgatgggacctctctggacttcagcacttaccgcagtagtcaaatggaatcacagtttctcagagatactatttgtgaagagagcttgagggagaaactccaagatgggagaataacaataagggagttctttatacttctccaggtccacatcttgatacagaaaccccgacagagcaatctcccaggcaattttactgtaaacacaccacctactccagaagacctgatgttaagtcaatatgtttaccgacccaagatacagatttatagagaagattgtgaggctcgtcgccaaaagattgaagaattaaagctttctgcatcgaaccaagataagctgttggttgatataaataagaacctgtgggaaaaaatgagacactgctctgacaaagagctgaaggcctttggaatttatcttaacaaaataaagtcatgttttaccaagatgactaaagtcttcactcaccaaggaaaagtggctctgtatggcaagctggtgcagtcagctcagaatgagagggagaaacttcaaataaagatagatgagatggataaaatacttaagaagatcgataactgcctcactgagatggaaacagaaactaagaatttggaggatgaagagaaaaacaatcctgtggaagaatgggattctgaaatgagagctgcagaaaaagaattggaacagctgaaaactgaagaagaggagcttcaaagaaatctcttagaactggaggtacaaaaagagcagacccttgctcaaatagactttatgcaaaaacaaagaaatagaactgaagagctactggatcagttgagcttgtctgagtgggatgtcgttgagtggagtgatgatcaagctgtattcacctttgtttatgacacgatacaactcaccatcacctttgaagagtcagttgttggtttccctttcctggacaagcgttataggaagattgttgatgtcaattttcaatctctgttagatgaggatcaagctcctccttcctcccttttagttcataagcttattttccagtacgttgaagaaaaggaatcctggaagaagacatgtacaacccagcatcagttacccaagatgcttgaagaattctcactggtagtgcaccattgcagactccttggagaggagattgagtatttaaagagatggggaccaaattataacctaatgaacatagatattaataataatgaattgagacttttattctctagctccgcagcatttgcaaagtttgaaataactttgtttctctcagcctattatccatctgtaccattaccttccaccattcagaatcacgttgggaacactagccaagatgatattgctaccattctatctaaagtgccactggagaacaactacctgaagaatgtagtcaagcaaatttaccaagatctgtttcaggactgccatttctaccactagacccttggaccaccattggaacaaccaagcagaatgtacttgatattatttcagggtcccattgctgttcagcctttgtttttacgtcattacaagctgagtaaaattccttctgatgatgttatagttaatctgtatgttttttatatctctgcagaatgatggtgatgaagtctggatggtaggcctcatagcctactatcaacttactcatctttgtaccaaaggtttaagtaataggacacttaggaaaaatgtctcctaactaaactagtgctttctgctttagtacaagccctaaggattaacttaagtataagaagtgttatcactgacaagaacattagccattttcccataactagatagagctatgattttttaggttgcctggcttctgcctagcagatatttctggagtagaaatgtatctgtctacaaactattatcctttttctccgttactaaaatgctattaagagaaagtagggctgggtgtgagccaccacacccagcaatgttttcttaataagtatagtttttctagggaaagttaattcatttttgtctagtacatatatgtaaatatattaatgttgtttttgtgtttgtgatgtagtaaggagatgtacatagaaattcattgaggtatatagatactcatctgtctaggcagttcccaattttctgaagaatgttttacagcaaaattttctattttcttttattaaatagtgacacgtcaaacaatgtcacatccaaaacactagtttcatcaatttctagcagtaataatagacttgctgtaagtattgttttctgatgccatacccttgtcatacatattattaaatgaccaatattatgtatgaagtagacaaaaaaatttactcaaacttcattcaaatcctaattgtgataatttttgttttatatttaattataaaccaaaatacatttgcatttttaagctaatttgtctcaaaattttgctttatatttttggatcaggttaaagtcctgtggatcccctgaatgttattgtccctcttgattggtttttacttctgagctatacgtcaaaagacacataagcttcaaaagtcaagacaaacctcatttgccataaaaatcaagatatagatgttctgttccgtaaactccttgaaaaacattttaaagtcatcaatatgatctgtttcccatgaaacttaagttagctttcttattggagttatttcttttctgtaagtctgaaaagtagagattttgttttacgcattttagtaacctgcaacaaccaactctaaaaaagatttggcttgtaatgacggtctctgcttttttgggtttggagtacacaattgtaatatttacttagttatttgtgtttttctttgttcaaggtattgactagtttcataaattttttgcaagtttttctttcattggttggaaagcagattacattttgcactattaaaataagtttattacttt

SEQ ID NO: 22513 - DNA, 5214 bp, Homo Sapiens
agaaacaaatgtttcagttgcacataggaaatgtttatgaggctggaaaactgaacctcttaacagttattcagttattaaatgaagtcttgaaggtgatgaaatatgaacgttgtcaggctgatcaagcaagattgacggtagaccttcactaccttgaaaaagagaccaaatttcagaaggaaagattatcagatctgaaacatatgaggtatagaataaaagatgatctcacaactataagacattctgttgttgaaaagcaaggagaatggcataaaaagtggaaagaatttcttggtttgtctcctttcagtctaattaaaggttggactccatctgtagatcttttaccaccaatgtctccgctttcgtttgatcctgcctcagaagaagtgtatgcaaagagtattctttgtcagtatcctgcttcacttccagatgcacataagcaacataaccaagaaaatggttgcagaggagacagtgataccttgggagcgctacatgatctagccaacagccctgcctctttcttgtcgcagtcagtttcatcatcagatagaaacagtgttacagtacttgaaaaggacacaaagatgggaactcccaaagaaaaaaatgaagcaatttctaagaaaataccagaatttgaagtggaaaattctccattgtcagatgttgcaaagaatacagagagtagtgcatttggagggtctttgccagctaaaaaaagtgatccatttcaaaaagagcaagatcatctggtagaagaggttgccagagcagttttatctgattcaccacagctctctgaaggaaaagaaataaaattagaggaactaattgactctctgggttctaaccccttcttaacaaggaatcagattccccgtactccagaaaacttgataactgaaattaggagctcatggagaaaagctattgaaatggaagaaaacagaactaaagaaccaattcaaatggatgctgaacatagagaagtattgccagaatcattacctgtgttgcacaatcaaagagaatttagcatggctgattttctcttagaaaccactgtatcagattttggccagtctcatttgactgaagagaaagttatttcagattgcgagtgtgtgcctcagaaacatgtgctgaccagtcacatagatgaaccaccaacacaaaatcagtcagatttgttaaataagaaagtaatttgcaagcaagatttggaatgtttagccttcaccaagctttcagaaactagccgaatggagacattctcccctgctgtcggcaataggatagatgtgatgggtggcagtgaagaggagtttatgaaaatattggaccacttagaagtttcttgtaacaaaccttccacaaataaaactatgttgtggaattcttttcagatatcaagtggaattagttctaagagttttaaagataatgattttggcatattacacgaaactctcccggaagaagttggtcatctaagttttaatagttccagtagttcagaggccaattttaaactggagccaaatagtcctatgcatggtggcactcttctagaagatgttgtgggagggagacagactactccagaatcagactttaatttacaggctcttcgcagtagatacgaggctctgaagaaatctctttccaagaaaagggaagaatcttacctctcgaattcccaaacacccgaaagacacaaaccagaattgagccctactccccaaaatgtacaaacagatgatacgcttaactttttggacacctgtgatttgcatactgagcatataaagccatctttacgcacgtccatcggtgaaagaaaacggtctctttcaccactaattaagttttctccagtggaacaaagattgagaaccacaatagcatgtagtcttggagaactacctaatttaaaggaagaagacattttgaataagagccttgatgcaaaagaaccaccgtctgacttgacaagatgaagacgtacccatttaatataactatgatgcacttaaattgaagctatgccacaggatagaaaatgaattacaacttaaatacatgttggaagtgtaacactgtttttcaaggtttaaaaaaattcctaatgccttttagccttctttaatatttttaggtaaggaaagtatgtttggattttttcctctttgtaggtatatgagattgaaatgtgaagtatttggacaacaaacgtcaagcaatgggaagccattttgatttcttgagtaatcttgtaagcattaagtgaatgacaaagtagtagtgtaacttatttcttatgttataacttcagtcaattaatataaggatagtttttgttgtatgttcactaaatggttaatataatagccattgaatatactaatctttcatcttagagaactatacaacttttattgtttcttaatggaacattctggctaaccagaaaaagtgagaaaagtagtaccttgggatgtgtagtcaagatgacaaattttaagactggaaaagctctaaacaggcttaatgattcttcaggtagaatgatcctgagaagtgatgtttgatggaataaagtgcatgtgatgattaagtgaagactggggcagaatgatttaaaaaaaggaaaaagatggaagatgagtagacacttgcaaggaacactgtcaaactataaatccattcagtgggttgtataacatttatatttagtctaatttagactttgataatttaatgctacttttatattttaacaaaaatataaattaaaattttcattagtctgttttgttgttgggtttttttgtgaggtactccctgttgggggaaaggaacaaggaacaaccatcagaatcccccagtccctacagaatagcctcacagtaacttgagaaaactgaacttggggttaaataacttgtcacacttgcagtctcctgcctcactccttcaggtgccctgcctagaaaaagacttgtgtctagcatccaagtgaacacatactattgccctctgtgaaccaggaggaatggaacaggcaatggaagggtgatagtacctacaataccctttgtagaccccatctcactaccatcaaaatcttgtccactagcccccaaaaaactggcaaggaaagaaggtggaggggaaatttatggaagtagatggcttaatagttatttcttttatcttgggctgcctttctctaagttggttgtcctgtcccagtgtgaagacccatctttttgtgagaaaagacaaaagaaagcacatgtaactaccttctttgcaatggaaaaggagaaagaaaaaatcttctcctaagttgctgttttcttttattagttaataaaacaaatcagggactatgcaggtctatggggaaacctttagtctgctttaagaaaactcagtatctgaaaatcttaacttagcatgtgatactgtcttatcagcatctgcagaagtgccaaagccactgctagacacttaatgtgtattatttcatttaattatattttaaatgtgcttccttggtaattcttaagctcgagaaagagtttgagaactgctgctaggaaatagagattcacatttaaccctgtggtacttttaagaagcaggtacgttgttgcatatatacttgggtagagattggtaactatctgatagggaagctcaagttggccacccaagtctgagaaacccttaattactgagaatcaaaagagcagaatgtctgtagacattttggatttgtaaaaatcacattgttgagttatacctgtgatgggctgaaagtttttggcattctttcctgttcttcatatgccagtaccataaacaaaaagtatctcagatctgtcactttcttctcctaaaccaatgtgattgcagctttttgccttcagccttttccctatccagtatctcctacatagttaccttttgatcttaaggaactgttttgattgggtcacttccttgcctaaaattccattgattgttcattgttaattctaaaatagagttcaaatttaaaggcatgtaagttcccctgtaacggatttcctctactcccccttccgctgtaatctcccatttttttactgaaatgcttcagtgagcatgggtctttagaggtcttgatatacaattttcctgaagcaggaataccttgctttcctctactagtttaccacaattacagctctcttttaagcctcagaaaaaaatctcacttccgtcttgaagtcttaatccacgctttttatatccatgtgcctactccttctctgaaatctcctatggtttatctttttattcatttaatatcccacgaattgattttattatatattttttatggttgcatgtggtctttctagttatagcaatatacacatacatgcataaatacatatacacctatgtaaatgtgtgttgggagtatgtattcacacacatacatataccccaaggccatgtgtcatctttatcaatatttaagttttggaattgttttgtttgcctcctatatcatggaataaatggtaaagagggctaatttattactctaagtggatttcttattacattaatatcagacatatagaatgtactttgttttactatttgtaagatacaaaggtatataaactgacatacatcagcttgaaacctgagataatgctaaaatgttctaattattttaaatgtttaaagaggacaaccatgtaatgttgctaaacatgaaaaatgtcatcaagtggaataaagaatagctgaagttaacatttgggggaaattgagctgaaaacaaaaatatgagtattttgataccttttctttaccatgagactcttgactatgaagtcaaatttatctaaaggaaaaacaggaattctggagacctgtgtaaaagcagactattatcttcctactgtgagagtactaaaattaaaatacgtttaatgacgttttcctcaatgtaaaagcattgaagtaaatgtttcttttatgttgcagatacatagttgctctagagatcacctttttctttatgcattgtgaatagcagtctgcatcctaagtttaaaatatttgagaatcctctatgggactctctgtaaatgttttaaatactgttgttttcaataaatattttatact

SEQ ID NO: 22514 - DNA, 4558 bp, Homo Sapiens
ctgagtagccagcgtcgccggcgaccgcggagttctgggctagtgggaccccgcgcgggctggttcgggatgagcgatggcatcggtcaaggtggccgtgagggtccggcccatgaatcgcagggaaaaggacttggaggccaagttcattattcagatggagaaaagcaaaacgacaatcacaaacttaaagataccagaaggaggcactggggactcaggaagagaacggaccaagaccttcacctatgacttttctttttattctgctgatacaaaaagcccagattacgtttcacaagaaatggttttcaaaaccctcggcacagatgtcgtgaagtctgcatttgaaggttataatgcttgtgtctttgcatatgggcaaactggatctggaaagtcatacactatgatgggaaattctggagattctggcttaatacctcggatctgtgaaggactcttcagtcggataaatgaaaccaccagatgggatgaagcttcttttcgaactgaagtcagctacttagaaatttataacgaacgtgtgagagatctacttcggcggaagtcatctaaaaccttcaatttgagagtccgtgagcatcccaaagaaggcccttatgttgaggatttatccaaacatttagtacagaattatggtgacgtagaagaacttatggatgcgggcaatatcaaccggaccaccgcagcgactgggatgaacgacgtcagtagcaggtctcatgccatcttcaccatcaagttcactcaggctaaatttgattctgaaatgccatgtgaaaccgtcagtaagatccacttggttgatcttgccggaagtgagcgtgcagatgccaccggagccaccggggttaggctaaaggaagggggaaatattaacaagtcccttgtgactctggggaacgtcatttctgccttagctgatttatctcaggatgctgcaaatactcttgcaaagaagaagcaagttttcgtgccttacagggattctgtgttgacttggttgttaaaagatagccttggaggaaactctaaaactatcatgattgccaccatttcacctgctgatgtcaattatggagaaaccctaagtactcttcgctatgcaaatagagccaaaaacatcatcaacaagcctaccattaatgaggatgccaacgtcaaacttatccgtgagctgcgagctgaaatagccagactgaaaacgctgcttgctcaagggaatcagattgccctcttagactcccccacagctttaagtatggaggaaaaacttcagcagaatgaagcaagagttcaagaattgaccaaggaatggacaaataagtggaatgaaacccaaaatattttgaaagaacaaactctagccctcaggaaagaagggattggagttgttttggattctgaactgcctcatttgattggcatcgatgatgaccttttgagtactggaatcatcttatatcatttaaaggaaggtcagacatacgttggtagagacgatgcttccacggagcaagatattgttcttcatggccttgacttggagagtgagcattgcatctttgaaaatatcggggggacagtgactctgatacccctgagtgggtcccagtgctctgtgaatggtgttcagatcgtggaggccacacatctaaatcaaggtgctgtgattctcttgggaagaaccaatatgtttcgctttaaccatccaaaggaagccgccaagctcagggagaagaggaagagtggccttctgtcctccttcagcttgtccatgaccgacctctcgaagtcccgtgagaacctgtctgcagtcatgttgtataaccccggacttgaatttgagaggcaacagcgtgaagaacttgaaaaattagaaagtaaaaggaaactcatagaagaaatggaggaaaagcagaaatcagacaaggctgaactggagcggatgcagcaggaggtggagacccagcgcaaggagacagaaatcgtgcagctccagattcgcaagcaggaggagagcctcaaacgccgcagcttccacatcgagaacaagctaaaggatttacttgcggagaaggaaaaatttgaagaggagaggctgagggaacagcaggaaatcgagctgcagaagaagagacaagaagaagagacctttctccgcgtccaagaagaactccaacgactcaaagaactcaacaacaacgagaaggctgagaagtttcagatatttcaagaactggaccagctccaaaaggaaaaagatgaacagtatgccaagcttgaactggaaaaaaagagactagaggagcaggagaaggagcaggtcatgctcgtggcccatctggaagagcagctccgagagaagcaggagatgatccagctcctgcggcgtggggaggtacagtgggtggaagaggagaagagggacctggaaggcattcgggaatccctcctgcgggtgaaggaggctcgtgccggaggggatgaagatggcgaggagttagaaaaggctcaactgcgtttcttcgaattcaagagaaggcagcttgtcaagctagtgaacttggagaaggacctggttcagcagaaagacatcctgaaaaaagaagtccaagaagaacaggagatcctagagtgtttaaaatgtgaacatgacaaagaatctagattgttggaaaaacatgatgagagtgtcacagatgtcacggaagtgcctcaagatttcgagaaaataaagccagtggagtacaggctgcaatataaagaacgccagctacagtacctcctgcagaatcacttgccaactctgttggaagaaaagcagagagcatttgaaattcttgacagaggccctctcagcttagacaacactctttatcaagtagaaaaggaaatggaagaaaaagaagaacagcttgcacagtaccaggccaatgcaaaccagctgcaaaagctccaagccacctttgaattcactgccaacattgcacgtcaggaggaaaaagtgaggaaaaaggaaaaggagattttggagtccagagagaagcagcagagagaggcgctggagcgggccctggccaggctggagaggagacattctgcgctgcagaggcactccaccctgggcacggagattgaagagcagaggcagaaacttgccagtctgaacagtggcagcagagagcagtcagggctccaggctagcctggaggctgagcaggaagccctggagaaggaccaggagaggttagaatatgaaatccagcagctgaaacagaagatttatgaggtcgatggtgttcaaaaagatcatcatgggaccctggaagggaaggtggcttcttccagcttgccagtcagtgctgaaaaatcacacctggttcccctcatggatgccaggatcaatgcttacattgaagaagaagtccaaagacgccttcaggatttgcatcgtgtgattagtgaaggctgcagtacatctgcagacacgatgaaggataatgagaaacttcacaatggcaccattcaacgtaaactaaaatatgagctgtgtcgtgacctcctgtgtgtcctgatgccagagcctgatgccgctgcctgcgctaatcatcccttgctccagcaagatctggttcagctttctcttgattggaaaacagaaatccctgatttagttttgccaaatggagttcaggtgtcatccaaattccagactaccttggttgacatgatttactttcttcatggaaatatggaagtcaatgtcccttccctggcagaagttcagttactgctctacacaacagtgaaagtcatgggtgactctggccatgaccagtgccagtcgctagtccttctgaacacccacattgcactggtgaaggaagactgtgttttttatccacgcattcgatctcgaaacatacctcctccgggtgcacaatttgatgtgatcaaatgccatgctttaagtgaattcaggtgtgttgttgttccagaaaagaaaaatgtgtcaacagtagaactagtcttcttacagaaactcaaaccttcagtgggttccagaaatagtccacctgagcaccttcaggaagccccaaatgtccagttgttcaccaccccattgtatcttcaaggcagtcagaatgtcgcacctgaggtctggaaacttactttcaattctcaagatgaggctctttggctaatctcacatttgacaagactctaaggaggagacttttaaagatgcactacatgttttttgagatcattaataaaataagcattgtgaaaacagtcaaggcaatatgaatatctccgtgtagctaattgaattggaactggaaaaatgcagacctctaaaattgaaaatgtaactattttaaatatctacaataaaataaaaacagctaatagcagagccccaatgaaatatctttatcatcaccttgcttcattttcttgaaactcaggcttgtaaatttgtgcctgcttcattatttgtgaggtgattaaagcatttctgattgtt

SEQ ID NO: 22515 - DNA, 3851 bp, Homo Sapiens
gtttccacaataaaactttttctaccagatggtatggaagcccggctccgctcagatgtcatccatgcaccattaccaagtcctgttgacaaagttgctgctaacactccaagtatgtactctcaggaactattccagctttctcagtatctacaggaggccttacatcgggaacaaatgttggaacagaagttagccacgcttcagcggctactagccatcacccaagaggcttcagataccagttggcaggctttaatagatgaagatagactcttatcacggttagaagttatgggaaaccaattacaggcatgctccaaaaatcaaacagaagatagtttacgaaaggaacttatagcattacaagaggataaacataactatgagacaacagccaaagagtccctgaggcgggttcttcaggagaaaattgaagtggttagaaaactttcagaagttgagcgaagtctgagtaatactgaagatgaatgtacccatctgaaagaaatgaatgaaaggactcaggaagaattaagagaattagccaacaaatataatggagcagttaatgagattaaagatttatctgataaattaaaggtagcagagggaaaacaagaggaaatccaacagaagggacaggctgagaaaaaagaattacaacataaaatagatgaaatggaagaaaaagaacaggagctccaggcaaaaatagaagctttgcaagctgataatgatttcaccaatgaaaggctaacagctttacaagagcacttgctttcaaagagtggcggggactgcacttttattcatcaattcatagaatgccagaagaagctgatcgtcgaagggcatctaaccaaagcggtagaagaaacaaagctttcaaaagaaaatcagacaagagcaaaagaatctgatttttcagatactctgagtccaagcaaggaaaaaagcagtgacgacactacagacgcccaaatggatgagcaagacctaaatgagcctcttgccaaagtgtcccttttaaaagatgacttgcagggtgcacagtcagaaattgaggcaaagcaagaaatacagcatcttcgaaaggaattgatcgaagcccaggagctagctagaacaagtaaacaaaaatgctttgaacttcaagctcttttggaagaagaaagaaaagcctatcgaaatcaagttgaggaatccactaaacaaatacaggttcttcaagcccaattgcagaggttacacatcgatactgagaatctccgggaggagaaggacagtgaaatcacaagtactagagatgaattgcttagtgcccgagatgaaattttgctccttcatcaagcagcagcaaaggttgcctctgagcgggacactgacattgcttctttacaagaagagcttaagaaggtgagagctgagcttgagcggtggcggaaagcagcgtctgaatatgagaaagaaatcacaagtctgcaaaacagttttcagcttagatgtcaacagtgtgaggaccagcagagagaagaagcaacaaggttgcaaggtgaactagagaagttgagaaaggaatggaatgcattggaaaccgaatgccattctctaaaaagggaaaatgttttgctatcatcagaactgcaacggcaagaaaaagaattgcacaattctcagaagcagagtttagagcttaccagtgatctcagcatccttcaaatgtctaggaaagaacttgagaatcaagtgggatccttgaaagaacagcatcttcgggattcagctgatttaaaaactcttctcagtaaggcagaaaaccaagcaaaggatgtgcagaaagagtatgaaaagacacagactgtactctcagaactgaagttgaagtttgaaatgactgagcaggaaaagcagtcaatcacagatgagctcaaacagtgtaaaaacaacctgaagctgctccgagagaaaggaaataataaaccctggccctggatgcccatgttggctgccctggttgcagtaacagccatcgtgctgtacgtgccaggtctggccagagcttctccatgagagcgttccttgagtccgtacaccgtcctccctctagaagctggcatcacactcatgctggggacaaacagaaccattttcttcctctttacctcttaaaacagcagaagtacaagaatacagctgtagggtcattgctttaaattatataaaatgtatctgtctataaagaagatataaaattgtgactttattctactgtaagcaataatttgcttgcaatttttcatgtaatttttaaattagtatgttaagattctgaatattatggtggcctaaagtaggcttcttggtacaccagattatttataacattaaatttatgagtattttactctgaattctgatcaccagataattcatttttctgatttgataactacccaaaccaaacaaccaatacatacatgggaagagaggccctgtgtgctcagtgcctatcagtttgaaatatatacacatatatatattttttacatatttacgccatttttacttgttatgaaaccactgagctattgggaacaagacttagagacaactatttgcgtggattttttttttttttaaggaaaaatacgtttggaaaataaactgttatggtgataatttggggaatatgtgcacgcttgttcagccttaatgtgacttgaagatgtggaggacatcaactttgaaaaactttccatgagagtatattttcttgagcaaactgaagtatttctgggagcaaaaacatagtaattacacaatttcagtgcagtcaaccaaaatgttgagtcaattggaatgtaatttattaaaccatgtatttaaagagatatttttctttaaaagccaagttactttctcatatacagcattttaggaagcatgattttttttttctatcatctattcctccaagcatgtttaattgaagaaagtattaatatctctttagataagcttgtattgacctaatttggtttatgatgtgtcagagctaattcatgttcagggtgagcgttgtacctaccaacaaatttcctggttgggtatgcaaatggttattttctttttattgttgttaattgggactttctgttaatgaaaagcactattcccaagattaatagtgttctatgcacaatgaagcacctaaaaacactgcttgatattataaatttaaaacacaagtgaaagtttagccatggttttgtgcggcatcatagttatgtcaataaagtttatttaggtcatagaatatcctaaagtatcacatagttaaatttttcagtcagtgaagaccgggagggaatgtcagtgaattggcttgaatgttctgtggcaatccacaggtctagccaaatattgctaggagtttagggtataatttgccttgtgatgtttggcagtcactgtttatactttaaaggttatattttaagctatttgagattgcttttgggaagatcactagatttatggaggaattagtcacaaatgacttgtagaaaatactgtcatatagttcatttcatcattttctgttgcaggaagccactccaccacagaatgctaatatgccagtggtacccagtacctcttgtatataggttattgcaaatattgttctgaaatgcttaacttcagaattacattttttaaagtaaataattgttttaaatctattttgtaaagatataaagtacaatagaatttctggagtacagattaaactatttgcactaacacacgtgacgtgcatgatttaataaaataactttactctccct

SEQ ID NO: 22516 - DNA, 4644 bp, Homo Sapiens
agccaagcccagcagagtggccccactggccagccgagccagcccccaggcacagccaccacgccactggagggtgacggcctctccgcgcccaccgaggttggcgacagccccctgcaggcccaggctttgggagaggcaggagtggccacaggaagtgaggctcagagcagcccgcaattccaggaccacacggaaggggaggaccaggacgcttccatcccctctgggggcagaggcctgtcccaggaggggaccggtccccccacctctgctggtgaaggccattctaggactgaagatgctgcccaggagctcctgttgcctgagtcaaaaggaggcagctctgagcccgggacagaactgcagaccaccgagcaacaggcaggggcctcagcctctatggcagttgatgctgtagctgagccagccaatgcagttaaaggggccgggaaggaaatgaaagagaagacccagagaatgaaacagccaccagcaaccactcctcctttcaaaacacactgccaggaagctgagaccaagaccaaggacgagatggctgctgctgaagaaaaagtcggtaagaatgaacaaggggagcctgaagacctcaagaagccagaggggaagaacagaagtgcagctgctgtgaaaaacgagaaggagcaaaaaaaccaggaagcagatgtccaggaagtgaaggcaagcacgctgagcccgggtggaggagtcaccgtgttcttccacgccatcatctctcttcatttcccattcaatcctgacctccataaagtcttcatcagaggaggagaagaatttggggagtcaaaatgggacagcaatatctgtgagctgcactacaccagagacttgggtcatgaccgcgttcttgttgaaggcattgtctgcatttccaagaagcacctagataaatacattccttacaagtacgtcatttataatggggaatcttttgagtatgagttcatttacaagcaccagcagaagaagggcgagtacgtcaaccgctgtctgttcataaaatcttcacttctgggctcaggagactggcatcagtactatgacatagtttatatgaagcctcatgggagactccagaaagtcatgaaccacatcacagacgggccgaggaaggacctggtgaaggggaagcagattgccgctgcgctcatgctggacagcaccttcagcatcctgcagacctgggacaccatcaacctgaacagcttcttcacccagttcgagcagttttgctttgtcctgcaacagcctatgatttatgaaggacaggcacagctgtggaccgatttgcagtacagggagaaagaggtgaagagatacctgtggcaacatctgaaaaaacacgtggtaccattgccggacggaaaaagcacggactttttgcctgtggactgcccagtgaggagtaaactgaaaacaggcctgattgtcctttttgtagtggaaaaaattgagcttttattagaaggcagcctggactggttgtgtcacctcctaacctcagatgccagctcaccagatgagtttcaccgtgacctaagccacatccttgggatacctcagagctggcggctgtacctggtgaacctgtgccaaagatgcatggacacaaggacgtacacctggctgggcgccctgcctgtcctgcactgctgtatggagctggccccgcggcacaaggatgcctggagacagcctgaggacacctgggccgctctggagggactctccttctcaccgttccgggaacaaatgctagatacgagttccctacttcagtttatgagagagaagcagcatttgctgagcatagacgagcctctcttccggtcctggtttagtctgctacctctgagtcacctggttatgtatatggaaaacttcattgagcacctgggtcgttttcctgctcatatcctggactgtctttcagggatttactaccggcttccgggacttgagcaagtcttgaatacgcaggatgttcaggatgttcagaacgttcagaacattttagaaatgctgttgcgactcctggacacttaccgggacaagattcccgaggaggccttgtcaccatcctacctgactgtgtgtctgaaactgcatgaagccatctgcagcagcacaaagctacttaagttttacgagctgccagccttatctgccgagattgtctgcagaatgattagacttctatctctggtggattctgcaggacagagagatgaaactggaaataattcagtccaaacagtcttccaagggacccttgctgctacgaaaaggtggctccgagaagtttttacaaagaacatgctcacatcttcaggtgcctcattcacatacgtcaaggaaattgaggtctggaggcggctggtggaaatccaattccccgcggagcatggctggaaggagtcgttgctgggagacatggaatggaggctcacaaaggaggaacccctctcccagatcactgcctactgcaatagttgctgggacaccaaaggcttagaggacagtgtggccaagaccttcgagaaatgcatcattgaagccgtgagctcagcctgccagtctcagaccagtatccttcaggggttctcttactctgatttgcggaaatttggcatcgtcttgtctgctgtgatcactaagtcctggcctaggaccgcggacaacttcgatgacattttaaagcatctgctcacgttggcagatgtcaagcacgtcttcagattgtgtggaaccgacgagaaaatactagcaaatgtcacagaggatgccaagaggctgatagctgttgccgactctgtgttgacgaaagttgttggtgacctcctaagtggcacgattttagttggacaactggagctgattataaagcacaagaatcagtttcttgacatctggcaactgagggaaaaaagtctttcaccccaggatgaaaaatgtgctgtggaggaagcactggattggagaagggaggaactgttacttctaaagaaagagaaaagatgtgttgatagtctcctgaagatgtgtgggaacgtgaaacatctgatacaagtggactttggagtgcttgcagtaagacactcacaagacctcagcagtaaaagattaaatgacaccatgacagtgagactgtccacctcctcgaactcgcagagggcaacgcattaccacctgagctcccaggtccaagaaatggctgggaagatagacttgctcagagacagccacatcttccagctcttctggcgggaagccgcagagccgctgagtgagcctaaggaggaccaggaagccgcagagttgctgagtgagcccgaagaagaatcagaaaggcacatccttgagcttcaagaggtgtatgactatttgtatcagccttcttacagaaagttcattaagttgcaccaggatctaaagtcaggagaggtcacccttgcagagattgatgtcatcttcaaggactttgtgaataaatacacggacctggattcagaacttaagatcatgtgcaccgtggaccaccagggccaaagagattggatcaaggaccgagtggaacagatcaaggaataccatcacctgcaccaggctgtccacgcagccaaggtcatcttgcaggtcaaagagagcctgggactgaacggtgacttcagtgttctcaacactttactaaattttactgataacttcgacgactttcgccgtgaaacactggaccagatcaaccaggagctcatccaggccaaaaagctgctccaggacatcagcgaggcccggtgcaaggggctgcaggctctgtccctgagaaaggagttcatctgctgggtccgggaggctcttggaggcatcaatgagctgaaggtgtttgtggacctggcctccatctcagcgggggagaatgacattgatgtggaccgggtggcctgcttccatgacgctgtgcagggctacgcatccctgctatttaagctggaccccagcgtggacttcagtgcattcatgaagcatctgaaaaagctgtggaaggctctggataaggaccagtacctgcccaggaaactggtgagtcttattctgtctctaatgcagattttgttgaatagagcattgcttagcaacgttagggcagtgactgtggaaatggtggcacacctgtgtggtaggtttgtacacagccgttttcaatgatatttaaaaagcttttcttcataaatggaaattcaccatcttgttacctagaaagcaggatacaaaattacatgacacatagtaatctctaaggtgcaaaacacacgtggaaaaaagacagaagggaaatatgctgaaacgttgccaggagttttctctgaatggttgtaattgtcattttattctgttactttttgttattttctataattgatagaattttttatcagaaaaaagtaaacatttaaaattagccaggcatggtggtgtgcgcctgtaatcccagctactctggaggctgagacagaattgcttgaacccgggaggcagagatagcagtgaactgagatcacaccactgtactccagcctgagtgacaaagtgagactctgtctc

SEQ ID NO: 22517 - DNA, 4094 bp, Homo Sapiens
gcttcccattccccgcccccacaacctgtgactctggctccctttgggggtcttgttagtctgggcctccccaggaagatgtgggggaggctctggcccctcctcctcagcatcctcacagcaactgcagtcccaggaccctcactgcggagaccgtctagagaactagatgccacccctcggatgaccataccctatgaagagctctctgggacccggcacttcaagggccaagcccagaactactcaacactgctgctggaggaggcctcagcaaggctgctggtgggagcccgaggtgccctgttctctctcagtgccaacgacataggagatggggctcacaaagagatccactgggaagcctccccagagatgcaaagcaaatgtcatcaaaaagggaaaaacaaccagacggagtgctttaaccatgtgcggttcctgcagcggctcaattctacccacctctatgcatgtgggactcacgccttccagcccctctgtgcagccattgatgctgaggccttcaccttgccaaccagcttcgaggaggggaaggagaagtgtccttatgacccagcccgtggcttcacaggcctcatcattgatggaggcctctacacagccactaggtatgaattccggagcattcctgacatccgccggagccgccacccacactccctgagaactgaggagacaccaatgcattggctcaatgatgcggagtttgtgttctccgtcctcgtgcgggagagcaaggccagtgcagtgggtgatgatgacaaggtgtactacttcttcacggagcgtgccactgaggagggctctggcagcttcactcagagccgcagcagtcaccgtgtggcccgtgtggctcgtgtctgcaagggagacctgggagggaagaagatcctgcagaagaagtggacttccttcctgaaagcccgtctcatctgccacattccactgtatgagacactgcgtggggtctgcagcctggatgctgaaacctcaagccgtacacacttctatgcagccttcacgctgagcacacagtggaagaccctggaggcctcagccatctgccgctatgacctggcagagatccaggctgtctttgcaggaccctatatggaataccaggatggttcccggcgctggggtcgctatgagggtggggtgcctgagccccggcctggctcgtgtatcacagattcattgcgcagccaaggctacaattcatcccaagacttgccatccctggtcctggactttgtaaagttgcacccactgatggctcggcccgttgtgcccacacgtggacggcccctgctgctcaagcgcaacatacgctacacacaccttacagggacacctgtcaccacgcctgctggacctacctatgacctgctctttctgggcacagctgatggctggatccacaaggccgtagtcctgggctctgggatgcacattattgaagagacacaagtgttcagggagtcccagtctgtggaaaatctagtcatctctctattgcagcacagcctctatgtgggggctcctagcggagtcatccagctaccactctccagctgctcccgctaccgatcctgctatgactgcatcttggcccgagacccctactgtggctgggaccctggcacccatgcctgcgcagcagccaccaccatagccaacaggtcccagggaagcaggacagcactgatacaggacatagagagaggaaatcgaggctgtgagagcagcagggatacagggccaccaccaccactgaagacccgctctgtgctccggggtgatgatgtcctcctgccctgtgaccagccatccaacctggcccgggccttgtggctactcaatgggagcatgggcctgagcgatgggcagggtggctaccgtgtgggcgtggacgggctgctggttacagatgcacagcctgagcacagtggcaactatggctgctatgccgaggaaaatggcctccgcaccctgctggcctcctatagtctcacagtccggccagccactcctgccccagctccaaaagcccctgccacacctggggcacagctggcacctgatgtgagactgctctatgtgctagccattgccgcgcttggtggcctctgcctcatcctggcctcctccctcctctatgtggcctgtctgcgggaaggcagacgagggcgccgacggaaatactcactgggtcgggccagccgggcaggaggatctgcggtgcaactgcagacagtctcaggccagtgtcctggagaggaagatgagggtgatgatgagggggctgggggcctggagggcagctgtctccagatcatccctggggagggagccccagccccaccacccccaccgcccccaccgccaccggctgagctgaccaatggcttggtggcactgcccagccggctgcggaggatgaatggcaatagctatgtgcttctgaggcagagcaacaatggagtaccagcagggccctgctccttcgccgaggaactcagccgcatcctggaaaaaaggaagcacacgcagctcgtggagcagctagatgagagctctgtctgagcccagcctcccagaacaaatgctcttccaagccagcctatctgtcccaggctgggccactgcctccctaacacagccaccctcccttcattacccccactccatacccttctcccaactttttgatgtccctgtagggctggccagtcaggcccagccaaagccccctcctcagtctccacagacccacatgtgagcagcccaggcccatcggtgctcctcagaggtaggtgctccctcaggatcaggtgccctgcagacccagagccagttcctatcccctaacctaaacacttataggtgaggactccatcctcctgttccattcatctgcccaaaccctttctctttctcccaggcagggctctgcaggtccatatgggctcaatgtcaccaccctctgcatggccctgtgtgctggatggtcctgaaaccagacaagtcctctgccagccacctaagccctgcgtacattcacatgcacacatggaagaatgtttatcggctgggctgcagtgcccccaccctcaccttctcctggtgcattcttgtttcatccctgcttctggacttggggtaccctcccaattgccacatcctatctggtcctcttccccagccccatgtggtgacctctttgtcaagagcttgggaacgggccagcctggggaggtaagactgcatcactcccctcctctcccttcctgtgtggcccttgtgaatcagcctccccactctccttggtcattctcaagagtatgagagacagagctccaggcatgtcccatccccatgcacatgtggtaacacacacctgtatcacacatgtgcttacatttccactcacatgcacctctgagcctcccttgctgtcttggacctgtctgttgggtttagtccgtggacatttcagagggagatccccctcccatttaactgtcctcacaggcccttgcctaggatggatgaccaacactgcactcaatgagccagcctctcttttgggggaatcaagcatttgcttcctctagactacagcagggaaagggaggagaaatctgatgtctcaactggcacatgaagcccattcttggaactatgcaaagggcagaggctgggagtttggacgcttagctcctacccctgtcctacctcaccggggcactttcaggggccaggggcctctgaagtctctaggcctatatgggacaatcaattctgactgagctcccccattcccctcgggtgaggatgactgttatttttgtagctgagaacgtggaatcccacgggtttttactgcccttcacccaacctctcccacctccaccccacaatgaatgtatttattgtgagaatggctacacttctttaggaatgcccccacttacaaccaggtgggtggaacaggcatgtgacagagtggggagcctgggctcagctcctccccctgccgttggttaataaacaccctttttccccac

SEQ ID NO: 22518 - DNA, 5640 bp, Homo Sapiens
ggaaacgcagaaaacagagagaggcattctgagtcatctgactggatgaagactgttccaagttacaaccaaacaaatagctccatggactttagaaattatatgatgagagatgagactctggaaccactgcccaaaaactgggaaatggcctacactgacacagggatgatctacttcattgaccacaataccaagacaaccacctggttggatcctcgtctttgtaagaaagccaaagcccctgaagactgtgaagatggagagcttccttatggctgggagaaaatagaggaccctcagtatgggacatactatgttgatcaccttaaccagaaaacccagtttgaaaatccagtggaggaagccaaaaggaaaaagcagttaggacaggttgaaattgggtcttcaaaaccagatatggaaaaatcacacttcacaagagatccatcccagcttaaaggtgtccttgttcgagcatcactgaaaaaaagcacaatgggatttggttttactattattggtggagatagacctgatgagttcctacaagtgaaaaatgtgctgaaagatggtcccgcagctcaggatgggaaaattgcaccaggcgatgttattgtagacatcaatggcaactgtgtcctcggtcacactcatgcagatgttgtccagatgtttcaattggtacctgtcaatcagtatgtaaacctcactttatgtcgtggttatccacttcctgatgacagtgaagatcctgttgtggacattgttgctgctacccctgtcatcaatggacagtcattaaccaagggagagacttgcatgaatcctcaggattttaagccaggagcaatggttctggagcagaatggaaaatcgggacacactttgactggtgatggtctcaatggaccatcagatgcaagtgagcagagagtatccatggcatcgtcaggcagctcccagcctgaactagtgactatccctttgattaagggccctaaagggtttgggtttgcaattgctgacagccctactggacagaaggtgaaaatgatactggatagtcagtggtgtcaaggccttcagaaaggagatataattaaggaaatataccatcaaaatgtgcagaatttaacacatctccaagtggtagaggtgctaaagcagtttccagtaggtgctgatgtaccattgcttatcttaagaggaggtcctccttcaccaaccaaaactgccaaaatgaaaacagataaaaaggaaaatgcaggaagtttggaggccataaatgagcctattcctcagcctatgccttttccaccgagcattatcaggtcaggatccccaaaattggatccttctgaggtctacctgaaatctaagactttatatgaagataaaccaccaaacaccaaagatttggatgtttttcttcgaaaacaagagtcagggtttggcttcagggtgctaggaggagatggacctgaccagtctatatatattggggctattattcccctgggagcagctgagaaagatggtcggctccgcgcagctgatgaactaatgtgcattgatggaattcctgttaaagggaaatcacacaaacaagtcttggacctcatgacaactgctgctcgaaatggccatgtgttactaactgtcagacggaagatcttctatggagaaaaacaacccgaggacgacagctctcaggccttcatttcaacacagaatggatctccccgcctgaaccgggcagaggtcccagccaggcctgcaccccaggagccctatgatgttgtcttgcaacgaaaagaaaatgaaggatttggctttgtcatcctcacctccaaaaacaaaccacctccaggagttattcctcataaaattggccgagtcatagaaggaagtccggctgaccgctgtggaaaactgaaagttggagatcatatctctgcagtgaatgggcagtccattgttgaactgtctcatgataacattgttcagctgatcaaagatgctggtgtcaccgtcacactaacggtcattgctgaagaagagcatcatggtccaccatcaggaacaaactcagccaggcaaagcccagccctgcagcacaggcccatgggacagtcacaggccaaccacatacctggggacagaagtgccctagaaggtgaaattggaaaagatgtctccacttcttacagacattcttggtcagaccacaagcaccttgcacagcctgacaccgcagtaatttcagttgtaggcagtcggcacaatcagaaccttggttgttatccagtagagctggagagaggcccccggggctttggattcagcctccgaggggggaaggagtacaacatggggctgttcatccttcgtcttgctgaagatggtcctgccatcaaagatggcagaattcatgttggtgaccagattgttgaaatcaatggggaacctacacaaggaatcacacatactcgagcaattgagctcattcaggctggtggaaataaagttcttcttcttttgaggccaggaactggcttgatacctgaccatggtttggctccttccggtctgtgctcctacgtgaaacccgagcaacattaaggctttcagggcttttcttggtctttccttaaaaagacttggtgattgggatattaataatccttcgtcttcaaatgtgatttatgatgaacagtcaccattacccccatcttcacattttgcttccatatttgaagagtctcacgtgccagtaattgaagaatctttgagagttcagatatgtgaaaaggcagaagaattaaaggacattgtgcctgaaaagaaaagcactttaaatgaaaatcagcctgagataaagcatcagtctcttctccagaaaaatgtgagtaagagggatccacccagcagtcatgggcacagtaacaagaaaaatctattaaaagtagaaaatggtgttacacgaagaggtagatcggttagtcccaaaaagccagccagtcaacattcagaggaacatttggataagattcctagtcctctaaaaaataaccccaaaagaagacccagagatcaatccctcagccccagcaaaggggaaaataaaagttgtcaggtcagcaccagggcaggctctggacaagatcagtgcagaaaaagcagaggtcggtcggccagcccaaaaaagcagcaaaaaattgaaggaagcaaagctccatcaaatgctgaggccaaattattagagggtaagagtcgaagaatagcaggctatacgggcagtaatgctgagcagatcccagatgggaaggaaaaatcagacgtcatcaggaaagatgcaaagcagaatcagttggaaaaaagcagaacaaggtctccagagaaaaaaatcaaaagaatggttgagaaatctcttccatccaaaatgactaataagactacaagtaaagaagtatctgaaaatgaaaaaggaaagaaagtaaccacaggagaaacaagttctagtaacgataaaataggagaaaatgtccagctatcagaaaagaggctgaagcaagaacctgaagagaaggtagtttcaaacaaaacagaagatcacaaagggaaagaactagaggcagctgacaaaaacaaagagactggaaggttcaaaccggaaagcagttctccagttaagaaaacactgataactccagggccctggaaggttccaagtggaaataaagtcacaggcactattggtatggctgagaaacggcagtaacctttagtataaaacaaagaaaaacaagttgtaatcttttcttacagcagcatttttccagaaaaagcctttttttttttttcagatattctgaaacagataagtacatgttaatgtgagcctcaagttacctaggctgcatgaagggcctttaggattgctaagaaccaactgtccccctggccggctgccctccctcgctctcaggaaggagctgcatccacatgctcatctgacccgccctgctcaggctgcccagctcgtcttcatgagtgtctgaacaaatgacatatgttgatattaacaatgtggtcacaactcactttgtatttgtgccaagttatctactgtatcatgtctgtttttatcctttttgttcagctgtttccacagtaatgaaaaagttaggtttggcttggaagttgatgatctcaatagcatgttgcatgtttacagagagaaatatgtgagtccttgcagaagaagagactgttaactcatcgttaaagatggccgttgtctcttctaacagctactgatgatgtcccactttaaaaataaaacccccaaacatcactactttaaggaaaaaaaaaatgtagtccaatattgatgctttcttatggctttttattttaatttggctggataagttgtttcaaataactgttaaagatattacttacaattgaatgtttgaaataagaaagtactttaagcaatagagttcatctcctgctgtgttatccaacctcgatgtatacttacagcatctcaggtcaccctttttatttcagttatttaattatgaaaccataaagaagcatgtggaaatagtgtttattgctctttgaagaaaaaccaccaactatttctggatattttggctgtacctactactaaagtcattagtctttaatacataatacatatttgaaaagtaaacatattatatagattatgtgagggacttaatcatgaaaccagtttcacagtccaagtaccaactcttctggtagcaggtgcacaagcttgggtgtttaaaaacaacctgtgtagggtatgcccagcaaatgaggacaaatgtgtagacagtacttactggatcttatttaacttttagctacattaactaactttcttatttaaaaacaagaaagggagactaaacatctgcttaacttgtacacattttcagaattctttttaaaagtctagttaaagatgtttcttagaagttggagactgttaacaacttccataaaatagatccaggtttttcagttccctgaagcagcattcagtagcatctatataaataaaggcaccttctgagaataaaactattttatggagtgtgtgaacacacttgttctgtcacctgggttcatcttgttgtgaagcacattaggtccaggtccttccctctgggagtctgactgtgaaactctttaacccaacaactcaattagcccctgtagataagacatgcttcccagagtgagatttttgaaatccccttttcatccagaactatatttacccacctattgtaactattcaaatagagcaaaattaggaggcttgataaatactaagaatttagtaccacagaaattatttattattttccctgtagtccacaattagtgataacgaatcctatttttgttaactgtgacataactttgatgtcatatgttgtcctatgtggttcttcctaagtaaactctgtactgattatatactgacttagcaatgtggccttggaatgctgagcaaaatgtggatgtactggttgtaaatgtttatatattgtacagtacctttatatatacacttgaggttctgattag

SEQ ID NO: 22519 - DNA, 3795 bp, Homo Sapiens
aacgggacgctttctctgggatgcattgagtcagggaatagaagatggggtgaatgatgtttctgacccacagaccgttgggatgcttttgctgtcactttcccatcatgctgcatgaggcatgacagcagctgtgccattgatgccccagaatagaatcactgaggcttctctccagcagctcctcaatggtgtcgctgtctctccccgcagtgatccccccaggggtgcccgatgcccaccccagggaaggagacctgccagtgttccaggaccagatccagcagcccagcaccgaggagggggccatggcagagagagtggagtccgaggggagtgacgaggaagcagaagacgaagggtcccagctggtggttttggacccagaccaccccctgatggtaagattccaggctgccctgaagaactacctgaaccgacagatcgaaaagttgaagctggacctccaagagctggttgtggctaccaagcagagccgagcccagcggcaggagctgggggtgaatctctatgaggtgcagcagcacctggtacacctgcagaagctgctggagaagagtcacgaccgccacgcaatggcctcgagcgagcgcaggcagaaggaggaggagctgcaggccgcccgcgctctctacaccaagacctgcgcagccgccaacgaggagcgcaaaaagttggcggctctgcagactgagatggagaacttggccctgcatctcttctacatgcagaacatcgaccaggacatgcgtgacgacatccgcgtgatgacacaagtggtaaagaaggccgagacggagaggatccgggcagaaatcgagaagaaaaagcaggacctgtatgtggaccagctcaccactcgagcccagcaactggaagaagacattgccctgtttgaggctcagtacttggcccaagctgaggacacccggattttaaggaaagcagtgagtgaggcctgcaccgagatcgacgccatcagcgtggagaagaggcgcatcatgcagcaatgggccagcagcctggtgggcatgaagcaccgcgacgaggcgcacagggcggtgctggaggcgctcagaggatgccagcatcaagccaaatccaccgacggcgagattgaggcctataagaaatccatcatgaaggaggaagaaaagaacgagaagctggcgagcatcctgaaccggacagagacggaagccacactgctgcagaagctcaccacccagtgcctgaccaagcaggtggccctgcagagccagttcaatacctacaggctcaccctgcaggacacagaggatgccctcagccaggaccagctggaacaaatgatactcacggaggagttgcaggccatccgccaagccatccagggcgagctggagctcaggaggaagacggatgctgccatccgggagaagctgcaggagcacatgacctccaacaagaccaccaaatacttcaaccagctcatcctgaggctgcagaaggagaagaccaacatgatgacacatctttccaaaatcaacggtgacattgcccagaccaccctggacatcacacacaccagcagcaggctggacgcacaccagaagaccctggtggagctggaccaggacgtgaagaaagtcaacgagctcatcaccaacagccagagcgagatctcccggcgcacgatcctgatcgagaggaagcaagggctcatcaacttcctcaacaagcagctggagcggatggtctccgagctggggggggaagaagtggggcccctggagcttgaaatcaaaaggctgagcaagctgatcgacgagcacgatggcaaggcggtccaggcccaggtgacctggctgcgcctgcagcaggagatggtcaaggtgacacaggagcaggaggagcagctggcctccctggacgcatccaagaaggagctccacatcatggagcagaagaaactacgagtagaaagcaagattgagcaggagaagaaggagcagaaggagatcgagcaccacatgaaggacctggacaacgacctgaagaagctcaacatgttgatgaataaaaaccggtgcagctcggaggagctggagcagaacaaccgggtgacagagaatgagttcgtgcgctcgctgaaggcctctgagagggagaccatcaagatgcaggacaagctgaaccagctcagcgaggagaaggcgaccctcctgaatcaactggtggaagcagaacaccagattatgctttgggagaaaaaaatccaactggcaaaagagatgcgttcctcagtggattccgagatcggccagacggagatccgggccatgaagggcgagatccacaggatgaaggtcaggctcgggcagctgctgaagcagcaggagaagatgatccgtgccatggagttggcggttgcccgcagagagaccgtcaccacccaggccgaggggcagcgcaagatggacaggaaggcgctcacccgcaccgacttccaccacaagcagcttgagctgcgccggaaaatcagggacgttcgcaaggccaccgatgagtgcaccaaaaccgtcctggaactggaagaaacacaaagaaatgtgagcagctccctcctagagaagcaggaaaagctgtcggtgattcaggcagacttcgacacactcgaggccgacctcacccggcttggggccctcaaacgacagaacctttcagagatcgtggccctgcagacacgccttaagcacctgcaggctgtgaaggaggggcgctacgtgttcctgttccgctccaagcagtccctagtgctggagcgccagcgcctggacaagcgactggctctcatcgccaccatcctggaccgcgtgcgggacgagtacccccagttccaggaggccctgcacaaggtcagccagatgatcgccaacaagctcgagtcaccagggccctcctagggagcagcctggactccgccttgcaaggcctccaggaagagatccggaattgtgtttgtcatgagggacttggaatcttttgtgttcctaaaaaccacatgtaccctcagaagggcatcgtttaagagaaataagccagccccacccataggaatctttttagccactcagcaatttaataaaccaggtaaaatcctagcgtttcccatggcatcccatcgcaaagacagagcctgtgactgcagacccacacacccacactcccacactgggcttactcgtccaggtaacactttggtttgcagcactcccaaatctgcacgtgcctctcacaacacaacgctgccacaggtccacaagctggtgggctgagcagaggtgggaaagttaaggcagctccagccagcctggcccgggaggctggtccccccagcacttccctctactaggtgcatctgaaaacccacaaaccaccttctttaccagttttcccatccccaccccttagaactctcaggtcccttttcctgcccccatgtccccatttgagttaaattcagatccacagcttgcaggagaaagtcagtggccccagacacacgtaacagggtgagcactgaaataagagcacgctggggcgtccacaccaagggactacgccccagtctgcccacctatcttttctccatcattaacccagcgctctttctccctggacttccaagtaccaatgaccttggggcttctttgcagtttaaagggaaaatgctctacaaaataatttcactttcaaacatttcagcagaagaataaaatcttttttctgaat

SEQ ID NO: 22520 - DNA, 1853 bp, Homo Sapiens
tgtgtctctcccgaccatggagggggtcgcggtggtgacggcgggcagcgtaggcgctgccaaaaccgagggagctgcagccttgccgcctccgcctccgcctcctgtctccccgcccgccctcacccctgcacccgcagcgggtgaggagggaccggcgcctctgtctgagacgggggctcccggctgctccggctcccggccccctgagctggagccggagcgcagcctgggccgcttcagaggccgcttcgaggacgaggacgaggagttggaagaagaagaggagctggaggaggaagaagaggaggaggaggaggacatgagtcacttctcgttgaggctggagggaggccggcaggactcggaggacgaggaggagcgcctgattaatctctctgagctgaccccatacatcttgtgttccatttgcaaaggttacttaatagatgcaactaccatcacagaatgtcttcataccttttgtaaaagctgcatcgtaagacatttttactacagcaacagatgtccaaaatgcaatatagtagtacatcagacacaacctctttataacataaggttggaccgacagttacaagacatagtgtacaaattagtgatcaatctagaggaaagagaaaaaaagcaaatgcatgatttctataaagaaagaggtctagaagtacctaaacctgctgttccacagccagtcccttcaagcaaaggaagatctaaaaaagtcctagaatcagtgtttcgtattccacctgaacttgatatgtctttattactggagttcattggtgctaatgaaggcacgggacattttaagccattggaaaagaagtttgttcgagtttcaggagaagcaactattggacatgtagaaaaattcctcagaagaaaaatgggtcttgatccagcttgtcaggtagatataatctgtggtgatcacctgttggagcagtatcaaactctaagggaaatccgacgtgcaataggtgatgcagcaatgcaggatggtctgcttgtccttcattatggtcttgtggtttctcctctgaagataacttgaagattctaggcacattatgaggagggaaacaaaggaggcttctgcaggactgcatctcaccaaagatttccatgaaatgtaattgctaccactttgctgttcaagacataacttacctatttttagcaccaagaattatagcgtttataagtacaacttggaacgatggaatgcatctgttactagagactgtatataaaaagcagccaaagctcaggggaaatttttcaaaaattgaattttaaaatttcttatgattttaaataccttgacattgattttgcttcccatctttgaagtaattggttagttttctttgttcagccatttcaagttggtggttgggatatctgctctctgggatggcatcagttgggcagtcatctttttggaagagaagtgtgcttttgagtggaagattcaaagccagtctttgttaaactgcagggtgtactctcaaagaccaaaactattggccacttttgtatgttgccagcatattttgaacttgtacctttttttatactagcaacactacaaaggagaagttactcatttcaaaatggatgaattgttattatgtgtgaagagactctgattttatgatctgtgccataaaatttcagtgtaataagacttcttcaatacatcttccaataaggggtgcttctttgtgacagtatttttatttctgacattcattttatttgggtacatagtgtggttgttgataccttgcaacagtattgcttctgaaagtaataaaaaattttaggag

SEQ ID NO: 22521 - DNA, 1112 bp, Homo Sapiens
tgagagtcctctagacaggcgctcctcgcagcaccgtagtgcgcttgcgctgagcagcccgcgagggcggaagtgggagctgcgaccgcgctccctgtgaggtgggcaagcggcgaaatggcgccctccgggagtcttgcagttcccctggcagtcctggtgctgttgctttggggtgctccctggacgcacgggcggcggagcaacgttcgcgtcatcacggacgagaactggagagaactgctggaaggagactggatgatagaattttatgccccgtggtgccctgcttgtcaaaatcttcaaccggaatgggaaagttttgctgaatggggagaagatcttgaggttaatattgcgaaagtagatgtcacagagcagccaggactgagtggacggtttatcataactgctcttcctactatttatcattgtaaagatggtgaatttaggcgctatcagggtccaaggactaagaaggacttcataaactttataagtgataaagagtggaagagtattgagcccgtttcatcatggtttggtccaggttctgttctgatgagtagtatgtcagcactctttcagctatctatgtggatcaggacttgccataactactttattgaagaccttggattgccagtgtggggatcatatactgtttttgctttagcaactctgttttccggactgttattaggactctgtatgatatttgtggcagattgcctttgtccttcaaaaaggcgcagaccacagccgtacccatacccttcaaaaaaattattatcagaatctgcacaacctttgaaaaaagtggaggaggaacaagaggcggatgaagaagatgtttcagaagaagaagctgaaagtaaagaaggaacaaacaaagactttccacagaatgccataagacaacgctctctgggtccatcattggccacagataaatcctagttaaattttatagttatcttaatattatgattttgataaaaacagaagattgatcattttgtttggtttgaagtgaactgtgacttttttgaatattgcagggttcagtctagattgtcattaaattgaagagtctacattcagaacataaa

SEQ ID NO: 22522 - DNA, 2393 bp, Homo Sapiens
cgcccgggcaggttgagaagccaggggccaagatggatcttctcctcgacatcagctaagcctggaggactcttcccctcagagaccatggagagggacagccacgggaatgcatctccagcaagaacaccttcagctggagcatctccagcccaggcatctccagctgggacacctccaggccgggcatctccagcccaggcatctccagcccaggcatctccagctgggacacctccgggccgggcatctccagcccaggcatctccagctggtacacctccaggccgggcatctccaggccgggcatctccagcccaggcatctccagcccgggcatctccggctctggcatcactttccaggtcctcatccggcaggtcatcatccgccaggtcagcctcggtgacaacctccccaaccagagtgtaccttgttagagcaacaccagtgggggctgtacccatccgatcatctcctgccaggtcagcaccagcaaccagggccaccagggagagcccaggtacgagcctgcccaagttcacctggcgggagggccagaagcagctaccgctcatcgggtgcgtgctcctcctcattgccctggtggtttcgctcatcatcctcttccagttctggcagggccacacagggatcaggcacaaggagcagagggagagctgtcccaagcacgctgttcgctgtgacggggtggtggactgcaagctgaagagtgacgagctgggctgcgtgaggtttgactgggacaagtctctgcttaaaatctactctgggtcctcccatcagtggcttcccatctgtagcagcaactggaatgactcctactcagagaagacctgccagcagctgggtttcgagagtgctcaccggacaaccgaggttgcccacagggattttgccaacagcttctcaatcttgagatacaactccaccatccaggaaagcctccacaggtctgaatgcccttcccagcggtatatctccctccagtgttcccactgcggactgagggccatgaccgggcggatcgtgggaggggcgctggcctcggatagcaagtggccttggcaagtgagtctgcacttcggcaccacccacatctgtggaggcacgctcattgacgcccagtgggtgctcactgccgcccactgcttcttcgtgacccgggagaaggtcctggagggctggaaggtgtacgcgggcaccagcaacctgcaccagttgcctgaggcagcctccattgccgagatcatcatcaacagcaattacaccgatgaggaggacgactatgacatcgccctcatgcggctgtccaagcccctgaccctgtccgctcacatccaccctgcttgcctccccatgcatggacagacctttagcctcaatgagacctgctggatcacaggctttggcaagaccagggagacagatgacaagacatcccccttcctccgggaggtgcaggtcaatctcatcgacttcaagaaatgcaatgactacttggtctatgacagttaccttaccccaaggatgatgtgtgctggggaccttcgtgggggcagagactcctgccagggagacagcggggggcctcttgtctgtgagcagaacaaccgctggtacctggcaggtgtcaccagctggggcacaggctgtggccagagaaacaaacctggtgtgtacaccaaagtgacagaagttcttccctggatttacagcaagatggaggtaagatccctgcagcaggacactgcacccagcaggctgggaacttcctcaggtggggaccctggaggagcacccagggtgtaggcagaggtcccctcagcgtccccatattcggggggtgttctggacagggtcaaatgtgatgcctggggtcaatcccagctgtctgtgtttctttccctgcttttcttccctcagaacagagctcagcgggttgaaaaagggtggacctacaggccaggcaggcagttgctgggcagatgttctcccagaagtatttttttgtgtaaggttgcaatggactttgaaaacgtttcagtttctgcagaggattttgtgatagtctttgttatcaagcatttatgcatgggaatccgctcttcatggcctttcccagctctgtttgttttagtctttttgattttctttttgttgttgttgttgtctttttttaaaaacacaagtgactccattttaactctgacaactttcacagctgtcaccagaatgctccctgagaactaccattctttccctttcccacttaaaatatttcatcagaacctcaccactatcataaaagagtataaagtaataaaataataaaaagcgaaaaaaaaaaaaaaaaaaaaaaaaaaaaaaaa

SEQ ID NO: 22523 - DNA, 881 bp, Homo Sapiens
gtgtagtgcaggcagggtggggaaaggacggggaaggactcgtgtgctgcgagctggcggccgggccggagtgctggggctttgaactccgagaggaggtggaccagaacttttggaactagtgccggcggctctccaccccccagtataaaagaacgtgtggatcactttgctgagtacatccaagatttgaagaactgaaataaatcagctttaaacctactttttaaaaatatctgggttggaatttgcccctgacaaataataaaatgatgagtgatgcaagtgacatgttggctgcagcgttggagcagatggatggtatcatagcaggttctaaggctctggaatattccaatgggatttttgattgccaatctcccacctctccattcatgggaagtttgcgagctctgcaccttgtggaagacctgcgtggattgttagagatgatggaaacagatgagaaagaaggcttgagatgccagatcccagattcaacagcagaaacgcttgttgaatggcttcagagtcaaatgacaaatggacacctaccagggaacggagatgtgtatcaagaaaggctggcacgtttagaaaatgataaagaatccctcgttcttcaggtaagtgtgttaacagaccaggtggaggctcagggagagaagattcgagatttggagttttgtcttgaagagcacagagagaagttgaatgccacagaagaaatgctgcagcaggtatgtgcagaggccagaaccaagatgggatttccctgctgaactatgtgagatgctgcatttctatgttgtgtttgctctgatgcagcagtaagttttttgattcacttagaccagcacattaaaaaaaaaaaaaaaaaa

SEQ ID NO: 22524 - DNA, 6399 bp, Homo Sapiens
catccttcctgtcttcgcagaggagtcctcgcgtgaaataagcgggttttgaaaacaaaaaaaagaaggagtggaagagggggccaggatccaggcctccatccccacagaagtgaagctacagctgggaggtctcctcccaccccaaccgtcaccctgggtcccgactgcccacctcctcctcctccccctccccccaacaacaacaacaacaacaactccaagcacaccggccataagagtgcgtgtgtccccaacatgaccgaacgaagaagggacgagctctctgaagagatcaacaacttaagagagaaggtcatgaagcagtcggaggagaacaacaacctgcagagccaggtgcagaagctcacagaggagaacaccacccttcgagagcaagtggaacccacccctgaggatgaggatgatgacatcgagctccgcggtgctgcagcagctgctgccccaccccctccaatagaggaagagtgcccagaagacctcccagagaagttcgatggcaacccagacatgctggctcctttcatggcccagtgccagatcttcatggaaaagagcaccagggatttctcagttgatcgtgtccgtgtctgcttcgtgacaagcatgatgaccggccgtgctgcccgttgggcctcagcaaagctggagcgctcccactacctgatgcacaactacccagctttcatgatggaaatgaagcatgtctttgaagaccctcagaggcgagaggttgccaaacgcaagatcagacgcctgcgccaaggcatggggtctgtcatcgactactccaatgctttccagatgattgcccaggacctggattggaacgagcctgcgctgattgaccagtaccacgagggcctcagcgaccacattcaggaggagctctcccacctcgaggtcgccaagtcgctgtctgctctgattgggcagtgcattcacattgagagaaggctggccagggctgctgcagctcgcaagccacgctcgccaccccgggcgctggtgttgcctcacattgcaagccaccaccaggtagatccaaccgagccggtgggaggtgcccgcatgcgcctgacgcaggaagaaaaagaaagacgcagaaagctgaacctgtgcctctactgtggaacaggaggtcactacgctgacaattgtcctgccaaggcctcaaagtcttcgccggcgggaaactccccggccccgctgtagagggaccttcagcgaccgggccagaaataataaggtccccacaagatgatgcctcatctccacacttgcaagtgatgctccagattcatcttccgggcagacacaccctgttcgtccgagccatgatcgattctggtgcttctggcaacttcattgatcacgaatatgttgctcaaaatggaattcctctaagaatcaaggactggccaatacttgtggaagcaattgatgggcgccccatagcatcgggcccagttgtccacgaaactcacgacctgatagttgacctgggagatcaccgagaggtgctgtcatttgatgtgactcagtctccattcttccctgtcgtcctaggggttcgctggctgagcacacatgatcccaatatcacatggagcactcgatctatcgtctttgattctgaatactgccgctaccactgccggatgtattctccaataccaccatcgctcccaccaccagcaccacaaccgccactctattatccagtagatggatacagagtttaccaaccagtgaggtattactatgtccagaatgtgtacactccagtagatgagcacgtctacccagatcaccgcctggttgaccctcacatagaaatgatacctggagcacacagtattcccagtggacatgtgtattcactgtccgaacctgaaatggcagctcttcgagattttgtggcaagaaatgtaaaagatgggctaattactccaacgattgcacctaatggagcccaagttctccaggtgaagagggggtggaaactgcaagtttcttatgattgccgagctccaaacaattttactatccagaatcagtatcctcgcctatctattccaaatttagaagaccaagcacacctggcaacgtacactgaattcgtacctcaaatacctggataccaaacataccccacatatgccgcgtacccgacctacccagtaggattcgcctggtacccagtgggacgagacggacaaggaagatcactatatgtacctgtgatgatcacttggaatccacactggtaccgccagcctccggtaccacagtacccgccgccacagccgccgcctccaccaccaccaccgccgccgcctccatcttacagtaccctgtaaatacctgtcatgtccttcaggatctctgccctcaaaatttattcctgttcagcttctcaatcagtgactgtgtgctaaattttaggctactgtatcttcaggccacctgaggcacatcctctctgaaacggctatggaaggttagggccactctggactggcacacatcctaaagcaccaaaagaccttcaacattttctgagagcaacagagtatttgccaataaatgatctctcatttttccaccttgactgccaatctaactaacaataattaataagtttactttccagccagtcctggaagtctgggttttacctgccaaaacctccatcaccatctaaattataggctgccaaatttgctgtttaacatttacagagaagctgatacaaacgcaggaaatgctgatttctttatggagggggagacgaggaggaggaggacatgacttttcttgcggtttcggtaccctctttttaaatcactggaggactgaggccttattaaggaagccaaaattatcggtgcagtgtggaaaggcttccgtgatcctctcgctgcacccttagaaacttcaccgtcttcaaactccatttccatggttctgttaattctcaaggagcagcaactcgactggttctcccaggagcaggaaaaacccttgtgacatgaaacatctcaggcctgaaaagaaagtgctctctcagatggactcttgcatgttaagactatgtcttcacatcatggtgcaaatcacatgtacccaatgactccggctttgacacaacaccttaccatcatcatgccatgatggcttccacaaagcattaaacctggtaaccagagattactggtggctccagcgttgttagatgttcatgaaatgtgaccacctctcaatcacctttgagggctaaagagtagcacatcaaaaggactccaaaatcccatacccaactcttaagagatttgtcctggtacttcagaaagaattttcatgagtgttcttaattggctggaaaagcaccagctgacgttttggaagaatctatccatgtgtctgcctccatatgcatctgggcatttcatcttcagtcccctcattagactgtagcattaggatgtgtggagagaggagaaatgatttagcacccagattcacactcctatgcctggaagggggacatctttgaagaagaggaattagggctgtggacactgtcttgaggatgtggacttccttagtgagctccacattacttgatggtaaccacttcaaaaggatcagaatccacgtaatgaaaaaggtccctctagaggatggagctgatgtgaagctgccaatggatgaaaagcctcagaaagcaactcaaaggactcaaagcaacggacaacacaagagttgtcttcagcccagtgacacctctgatgtcccctggaagctttgtgctaacctgggactgcctgacttcctttagcctggtcccttgctactaccttgaactgttttatctaacctctctttttctgtttaattctttgctactgccattgaccctgctgcaggatttgtgtcattttcctgcctggttgctgagactccattttgctgccacacacagagatgtaagaggcaggctttaattgccaaagcacagtttgagcagtagaaaacaacatggtgtatatctcaaattgcctgacatgaagaggagtctaacggtgaagtttcacttttcatcagcatcatctttcacatgttcattatcatcygctcttattctttgcatgtttaaacactttaaaattttttagtataatttttagtgtgttttgaagtggtgactaggctttcaaaaacttccatttgaattacaaagcactatccagttcttattgttaaactaagtaaaaatgataagtaacatagtgtaaaatattcctttactgtgaacttcttacaatgctgtgaatgagaggctcctcagaactggagcatttgtataataattcatcctgttcatcttcaattttaacatcatatataatttcaattctatcaattgggcctttaaaaatcatataaaaggatataaaatttgaaaagagaaacctaattggctatttaatccaaaacaacttttttttttccttcaatggaatcagaaagcttgtcaatcactcatgtgttttagagtaattacttttaaaatggtgcatttgtgcttctgaactattttgaagagtcacttctgtttacctcaagtatcaattcatcctccatacatttgaattcaagttgttttttgtcaaatttacagttgtcaattgatcttcaagctgcagggtgcctagaaatgggccgttgtctgtagccctggcatgtgcacacggacatttgccaccactgcaagcaaaagtctggagaagttcaccaacgacaagaacgattagggaaaatatgctgctgtgggttaacaactcagaaagtccctgatccacatttggctgtttactaaagcttgtgattaactttttggcagtgtgtactatgctctattgctatatatgctatctataaatgtagatgttaaggataagtaattctaaatttattattctatagttttgaagtttggttaagtttcctttcactcaattgatttattttgttgttaatcaaatttatgttaattggatcctttaaattttttttggcattttccaacaaaaatggctttattcataagaaaggaaaaaaatcaatggaatttgatatctaaagaagttagaaagggagcaaaataaaaaacataaaggagatagatgaattagtaagcaaatcagtagtcgagtttttcaaactggcaaaattaattaattgacttttagcccaaatttacattgttaattaaatcaagaaggaagaagatctaagagctcccattgataggcaagcctagagagaactagctaaatttatcatgctaggatattgaaacacagaaagtttacatacatttatgaagggtcaatttagtttggacagtgaggtatttgtcttagtggaaaaaaggagaattagtctgatcaaatcgtgaagtaatacagtgaacttgcaggtgcacaaaataagagggccacatctatatggtgcagtctggaattctgtttaagtttgtaggtacctcttggacttctgaattgatccagttgtcatccaccacagacatctcacatcagatacagacagttccaagattgacaacagagaacaacctgctggaaagacctgggcagaaatggagagccctgcgggaaccatgctacattttcatctaaagagagaatgcacatctgatgagactgaaagttctttgttgttttagattgtagaatggtattgaattggtctgtggaaaattgcattgcttttatttctttgtgtaatcaagtttaagtaataggggatatataatcataagcattttagggtgggagggactattaagtaattttaagtgggtggggttatttagaatgttagaataatattatgtattagatatcgctataagtggacatgcgtacttacttgtaaccctttaccctataattgctatccttaaagatttcaaataaactcggagggaactgcagggagaccaacttatttagagcgaattggacatggataaaaaccccagtgggagaaagttcaaaggtgattagattaataatttaatagaggatgagtgacctctgataaattactgctagaatgaacttgtcaatgatggatggtaaattttcatggaagttataaaagtgataaataaaaacccttgcttttacccctgtcagtagccctcctcctaccactgaaccccattgcccctacccctccttctaactttattgctgtattctcttcactctatatttctctctatttgctaatattgcattgctgttacaataaaaattcaataaagatttagtggttaagtgc

SEQ ID NO: 22525 - DNA, 1169 bp, Homo Sapiens
ggcgggttaaagagcgcgttgctggctgggccacgcgtgcttgagaaggttcaatggcgtggcagggactagcggccgagttcctgcaggtgccggcggtgacgcgggcttacaccgcagcctgtgtcctcaccaccgccgcggtgcagctggagctcctcagcccctttcaactctacttcaacccgcaccttgtgttccggaagttccaggtctggaggctcgtcaccaacttcctcttcttcgggcccctgggattcagcttcttcttcaacatgctcttcgtgttccgctactgccgcatgctggaagagggctccttccgcggccgcacggccgacttcgtcttcatgtttctcttcgggggcgtccttatgaccctgctgggactcctgggcagcctgttcttcctgggccaggccctcatggccatgctggtgtacgtgtggagccgccgcagccctcgggtgagggtcaacttcttcggcctgctcactttccaggcaccgttcctgccttgggcgctcatgggcttctcgctgctgctgggcaactccatcctcgtggacctgctggggattgcggtgggccatatctactacttcctggaggacgtcttccccaaccagcctggaggcaagaggctcctgcagacccctggcttcctgctggcgacagcccagcagtgcccacacaggactgggccctccgcaggggacttcagagcagcaaggccccagctggcagtagcctgaccatctggacacagcagagccagggcggcccagggacggcaggagagctcgcggcaccttcctgaggccaagcaaggggagcagggttagggctgttcctgaaaggcagagagcctcttgccctgagcctcacagctactcttctcagctctctgggtctggaaggagaacaggctgaggggagctgagaggagctgaggtgctacccggagccccattcacccccacctgcccacttgggaatctgaggcagaggagggtgaggcctgtgtgccaaccttgttcacataccaccttcgtccccccaggccccggccccactcctggctctcattatttttatgttaaaactttgaagaaattgaacatgacctgttgaagaaattaaaaaaaaaaaaaaaaaaaaaaaaaaaa

SEQ ID NO: 22526 - DNA, 6253 bp, Homo Sapiens
gtaacaaccgtcaccctgggtcccgactgcccacctcctcctcctccccctccccccaacaacaacaacaacaacaactccaagcacaccggccataagagtgcgtgtgtccccaacatgaccgaacgaagaagggacgagctctctgaagagatcaacaacttaagagagaaggtcatgaagcagtcggaggagaacaacaacctgcagagccaggtgcagaagctcacagaggagaacaccacccttcgagagcaagtggaacccacccctgaggatgaggatgatgacatcgagctccgcggtgctgcagcagctgctgccccaccccctccaatagaggaagagtgcccagaagacctcccagagaagttcgatggcaacccagacatgctggctcctttcatggcccagtgccagatcttcatggaaaagagcaccagggatttctcagttgatcgtgtccgtgtctgcttcgtgacaagcatgatgaccggccgtgctgcccgttgggcctcagcaaagctggagcgctcccactacctgatgcacaactacccagctttcatgatggaaatgaagcatgtctttgaagaccctcagaggcgagaggttgccaaacgcaagatcagacgcctgcgccaaggcatggggtctgtcatcgactactccaatgctttccagatgattgcccaggacctggattggaacgagcctgcgctgattgaccagtaccacgagggcctcagcgaccacattcaggaggagctctcccacctcgaggtcgccaagtcgctgtctgctctgattgggcagtgcattcacattgagagaaggctggccagggctgctgcagctcgcaagccacgctcgccaccccgggcgctggtgttgcctcacattgcaagccaccaccaggtagatccaaccgagccggtgggaggtgcccgcatgcgcctgacgcaggaagaaaaagaaagacgcagaaagctgaacctgtgcctctactgtggaacaggaggtcactacgctgacaattgtcctgccaaggcctcaaagtcttcgccggcgggaaactccccggccccgctgtagagggaccttcagcgaccgggccagaaataataaggtccccacaagatgatgcctcatctccacacttgcaagtgatgctccagattcatcttccgggcagacacaccctgttcgtccgagccatgatcgattctggtgcttctggcaacttcattgatcacgaatatgttgctcaaaatggaattcctctaagaatcaaggactggccaatacttgtggaagcaattgatgggcgccccatagcatcgggcccagttgtccacgaaactcacgacctgatagttgacctgggagatcaccgagaggtgctgtcatttgatgtgactcagtctccattcttccctgtcgtcctaggggttcgctggctgagcacacatgatcccaatatcacatggagcactcgatctatcgtctttgattctgaatactgccgctaccactgccggatgtattctccaataccaccatcgctcccaccaccagcaccacaaccgccactctattatccagtagatggatacagagtttaccaaccagtgaggtattactatgtccagaatgtgtacactccagtagatgagcacgtctacccagatcaccgcctggttgaccctcacatagaaatgatacctggagcacacagtattcccagtggacatgtgtattcactgtccgaacctgaaatggcagctcttcgagattttgtggcaagaaatgtaaaagatgggctaattactccaacgattgcacctaatggagcccaagttctccaggtgaagagggggtggaaactgcaagtttcttatgattgccgagctccaaacaattttactatccagaatcagtatcctcgcctatctattccaaatttagaagaccaagcacacctggcaacgtacactgaattcgtacctcaaatacctggataccaaacataccccacatatgccgcgtacccgacctacccagtaggattcgcctggtacccagtgggacgagacggacaaggaagatcactatatgtacctgtgatgatcacttggaatccacactggtaccgccagcctccggtaccacagtacccgccgccacagccgccgcctccaccaccaccaccgccgccgcctccatcttacagtaccctgtaaatacctgtcatgtccttcaggatctctgccctcaaaatttattcctgttcagcttctcaatcagtgactgtgtgctaaattttaggctactgtatcttcaggccacctgaggcacatcctctctgaaacggctatggaaggttagggccactctggactggcacacatcctaaagcaccaaaagaccttcaacattttctgagagcaacagagtatttgccaataaatgatctctcatttttccaccttgactgccaatctaactaaaataattaataagtttactttccagccagtcctggaagtctgggttttacctgccaaaacctccatcaccatctaaattataggctgccaaatttgctgtttaacatttacagagaagctgatacaaacgcaggaaatgctgatttctttatggagggggagacgaggaggaggaggacatgacttttcttgcggtttcggtaccctctttttaaatcactggaggactgaggccttattaaggaagccaaaattatcggtgcagtgtggaaaggcttccgtgatcctctcgctgcacccttagaaacttcaccgtcttcaaactccatttccatggttctgttaattctcaaggagcagcaactcgactggttctcccaggagcaggaaaaacccttgtgacatgaaacatctcaggcctgaaaagaaagtgctctctcagatggactcttgcatgttaagactatgtcttcacatcatggtgcaaatcacatgtacccaatgactccggctttgacacaacaccttaccatcatcatgccatgatggcttccacaaagcattaaacctggtaaccagagattactggtggctccagcgttgttagatgttcatgaaatgtgaccacctctcaatcacctttgagggctaaagagtagcacatcaaaaggactccaaaatcccatacccaactcttaagagatttgtcctggtacttcagaaagaattttcatgagtgttcttaattggctggaaaagcaccagctgacgttttggaagaatctatccatgtgtctgcctccatatgcatctgggcatttcatcttcagtcccctcattagactgtagcattaggatgtgtggagagaggagaaatgatttagcacccagattcacactcctatgcctggaagggggacatctttgaagaagaggaattagggctgtggacactgtcttgaggatgtggacttccttagtgagctccacattacttgatggtaaccacttcaaaaggatcagaatccacgtaatgaaaaaggtccctctagaggatggagctgatgtgaagctgccaatggatgaaaagcctcagaaagcaactcaaaggactcaaagcaacggacaacacaagagttgtcttcagcccagtgacacctctgatgtcccctggaagctttgtgctaacctgggactgcctgacttcctttagcctggtcccttgctactaccttgaactgttttatctaacctctctttttctgtttaattctttgctactgccattgaccctgctgcaggatttgtgtcattttcctgcctggttgctgagactccattttgctgccacacacagagatgtaagaggcaggctttaattgccaaagcacagtttgagcagtagaaaacaacatggtgtatatctcaaattgcctgacatgaagaggagtctaacggtgaagtttcacttttcatcagcatcatctttcacatgttcattatcatccgctcttattcttgcatgtttaaacacttaaaatttttagtataatttttagtgtgttttgaagtggtgactaggctttcaaaaacttccattgaattacaaagcactatccagttcttattgttaaactaagtaaaaatgataagtaacatagtgtaaaatattcctttactgtgaacttcttacaatgctgtgaatgagaggctcctcagaactggagcatttgtataataattcatcctgttcatcttcaattttaacatcatatataatttcaattctatcaattgggcctttaaaaatcatataaaaggatataaaatttgaaaagagaaacctaattggctatttaatccaaaacaacttttttttttccttcaatggaatcagaaagcttgtcaatcactcatgtgttttagagtaattacttttaaaatggtgcatttgtgcttctgaactattttgaagagtcacttctgtttacctcaagtatcaattcatcctccatacatttgaattcaagttgttttttgtcaaatttacagttgtcaattgatcttcaagctgcagggtgcctagaaatgggccgttgtctgtagccctggcatgtgcacacggacatttgccaccactgcaagcaaaagtctggagaagttcaccaacgacaagaacgattagggaaaatatgctgctgtgggttaacaactcagaaagtccctgatccacatttggctgtttactaaagcttgtgattaactttttggcagtgtgtactatgctctattgctatatatgctatctataaatgtagatgttaaggataagtaattctaaatttattattctatagttttgaagtttggttaagtttcctttcactcaattgatttattttgttgttaatcaaatttatgttaattggatcctttaaattttttttggcattttccaacaaaaatggctttattcataagaaaggaaaaaaatcaatggaatttgatatctaaagaagttagaaagggagcaaaataaaaaacataaaggagatagatgaattagtaagcaaatcagtagtcgagtttttcaaactggcaaaattaattaattgacttttagcccaaatttacattgttaattaaatcaagaaggaagaagatctaagagctcccattgataggcaagcctagagagaactagctaaatttatcatgctaggatattgaaacacagaaagtttacatacatttatgaagggtcaatttagtttggacagtgaggtatttgtcttagtggaaaaaaggagaattagtctgatcaaatcgtgaagtaatacagtgaacttgcaggtgcacaaaataagagggccacatctatatggtgcagtctggaattctgtttaagtttgtaggtacctcttggacttctgaattgatccagttgtcatccaccacagacatctcacatcagatacagacagttccaagattgacaacagagaacaacctgctggaaagacctgggcagaaatggagagccctgcgggaaccatgctacattttcatctaaagagagaatgcacatctgatgagactgaaagttctttgttgttttagattgtagaatggtattgaattggtctgtggaaaattgcattgcttttatttctttgtgtaatcaagtttaagtaataggggatatataatcataagcattttagggtgggagggactattaagtaattttaagtgggtggggttatttagaatgttagaataatattatgtattagatatcgctataagtggacatgcgtacttacttgtaaccctttaccctataattgctatccttaaagatttcaaataaactcggagggaactgcagggagaccaacttatttagagcgaattggacatggataaaaaccccagtgggagaaagttcaaaggtgattagattaataatttaatagaggatgagtgacctctgataaattactgctagaatgaacttgtcaatgatggatggtaaattttcatggaagttataaaagtgataaataaaaacccttgcttttacccctgtcagtagccctcctcctaccactgaaccccattgcccctacccctccttctaactttattgctgtattctcttcactctatatttctctctatttgctaatattgcattgctgttacaataaaaattcaataaagatttagtggttaagtgc

SEQ ID NO: 22527 - DNA, 4002 bp, Homo Sapiens
ccccagaaggcgacgcctcttgcctcctgtctctcgcctctcgaaggaagtttgctcttaatttcagagccgggttcgccgtcggatcaacctccaggagctagcagcgggcgcggaccgggcagtttccgcgctcagcacaggcagctcgcggtcatgggcggctcagcctccagccagctggacgagggcaagtgcgcttacatccgagggaaaactgaggctgccatcaaaaacttcagtccctactacagtcgtcagtactctgtggctttctgcaatcacgtgcgcactgaagtagaacagcaaagagatttaacgtcacagtttttgaagaccaagccaccattggcgcctggaactattttgtatgaagcagagctatcacaattttctgaagacataaagaagtggaaggagagatacgttgtagttaaaaatgattatgctgtggagagctatgagaataaagaggcctatcagagaggagctgctcctaaatgtcgaattcttccagccggtggcaaggtgttaacctcagaagatgaatataatctgttgtctgacaggcatttcccagaccctcttgcctccagtgagaaggagaacactcagccctttgtggtcctgcccaaggaattcccagtgtacctgtggcagcccttcttcagacacggctacttctgcttccacgaggctgctgaccagaagaggtttagtgccctcctgagtgactgcgtcaggcatctcaatcatgattacatgaagcagatgacatttgaagcccaagcctttttagaagctgtgcaattcttccgacaggagaagggtcactatggttcctgggaaatgatcactggggatgaaatccagatcctgagtaacctggtgatggaggagctcctgcccactcttcagacagacctgctgcctaagatgaaggggaagaagaatgacagaaagaggacgtggcttggtctcctcgaggaggcctacaccctggttcagcatcaagtttcagaaggattaagtgccttgaaggaggaatgcagagctctgacaaagggcctggaaggaacgatccgttctgacatggatcagattgtgaactcaaagaactatttaattggaaagatcaaagcgatggtggcccagccggcggagaaaagctgcttggagagtgtgcagccattcctggcatccatcctggaggagctcatgggaccagtgagctcgggattcagtgaagtacgtgtactctttgagaaagaggtgaatgaagtcagccagaacttccagaccaccaaagacagtgtccagctaaaggagcatctagaccggcttatgaatcttccgctgcattccgtgaagatggaaccttgttatactaaagtcaacctgcttcacgagcgcctgcaggatctcaagagccgcttcagattcccccacattgatctggtggttcagaggacacagaactacatgcaggagctaatggagaatgcagtgttcacttttgagcagttgctttccccacatctccaaggagaggcctccaaaactgcagttgccattgagaaggttaaactccgagtcttaaagcaatatgattatgacagcagcaccatccgaaagaagatatttcaagaggcactagttcaaatcacacttcccactgtgcagaaggcactggcgtccacatgcaaaccagagcttcagaaatacgagcagttcatctttgcagatcataccaatatgattcacgttgaaaatgtctatgaggagattttacatcagatcctgcttgatgaaactctgaaagtgataaaggaagctgctatcttgaagaaacacaacttatttgaagataacatggccttgcccagtgaaagtgtgtccagcttaacagatctaaagccccccacagggtcaaaccaggccagccctgccaggagagcttctgccattctgccaggagttctgggtagtgagaccctcagtaacgaagtattccaggagtcagaggaagagaagcagcctgaggtccctagctcgttggccaaaggagaaagcctttctctccctgggccaagcccacccccagatgggactgagcaggtgattatttcaagagtggatgaccccgtggtgaatcctgtggcaacagaggacacagcaggactcccgggcacatgctcatcagagctggagtttggagggacccttgaggatgaagaacccgcccaggaagagccagaacccatcactgcctcgggttctttgaaggcgctcagaaagttgctgacagcgtccgtggaagtaccagtggactctgctccagtgatggaagaagatacgaatggggagagccacgttccccaagaaaatgaagaagaagaggaaaaagagcccagtcaggcagctgccatccaccccgacaactgtgaagaaagtgaagtcagcgagagggaggcccaacctccctgtcccgaggcccatggggaggagttggggggatttccagaggtaggcagcccagcctctccgccagccagtggagggctcaccgaggagcccctggggcccatggagggggagctcccaggagaggcctgcacactcactgcccatgaaggaagagggggcaagtgtaccgaggaaggggatgcctcacagcaagagggctgcaccttaggttctgaccccatctgcctcagtgagagccaggtttctgaggaacaagaagagatgggagggcaaagcagcgcggcccaggccacggccagtgtgaatgcagaggagatcaaggtagcccgtattcatgagtgtcagtgggtggtggaggatgctccaaacccggatgtcctgctgtcacacaaagatgacgtgaaggagggagaaggtggtcaggagagtttcccagagctgccctcagaggagtgaaagggacaatttggctgaagtctttctctgaaaaaagccaaagggttataggggtacacttaggggttgcatgcaagctgttaccaaaaaatttttaagtattttcttaatttgaataataaaaccagaggaaatgcatacagggcatgagcaactgaggcaaacctttgtggacatgaattgttctacgatgaatttttgctttagtattttaataagaattacaaagacaatggcatacttggggtgagagggagctgaggatgtctgaggagggaatagtattgcagggaagactgagaaaacagtaggatgacagttttgagtatactctgcacttttcaattgtgcaatcttcttgtgcactttaaggctttttaattttgtttgagaatgcaaatgtatactgtaagtctacctttactatctactatgcctacttcaccatctcttaaggactcggcatttgtccacagtcagactgcaagagagggtaggtcatgaacagtcacccgtgctggctgtagcccccacagaggcaatcatgcccaatagattcaagagaagctaagcggaaatggagggtggaaggtgtgatctgtgggactgtctgggcctgttactcatcctgctatcaatttcttattaattaatcttgatgattcttattaattaatcacatttgcaggaaattcagatgaggcaagaaaattttattggcctgggtaagactgaaagcattccaaattaggcttagactgtgcaaagggcttagctaagttatcgagcttaaaacccgtcaattaaacaaacattatttgaacagttactgcatgccacgcactgtgttgggcttagtaataaaaaaaagaaaagataagtgcttgttctagcataaattaaaaggtccaagggaatttaatctggaagagaacatatgccaatttttaaactatgacagcttttttttttctctttccattcaaatagtcctggttcattcccagaagggcacaaaatgaatgaataaataaataaatgaataaagacaaaagccaa

SEQ ID NO: 22528 - DNA, 5739 bp, Homo Sapiens
  misc_feature (3927)..(3927): n is a, c, g, or t
  misc_feature (3929)..(3929): n is a, c, g, or t
  misc_feature (3951)..(3951): n is a, c, g, or t
  misc_feature (5719)..(5719): n is a, c, g, or t
  misc_feature (5726)..(5726): n is a, c, g, or t
gaaccatcaggggccagcctagttggagccttagaaccagaacttgaaggaggaggggatcaggggacaggaggacagagcatgcagggccttgtcgtcaccaaactttggctcttattctgtgatgtgaagccagtggagggttttgggcagaggaacgacatgatatgacttaggtttagcagggtcactctggcagctgtgttaaaaataccctgggaagcagggcaaggggcagatgcatggagcacccacagtgaggaggccacagcaggaatccaggtgagaggtgatcggacttgggcgggctgcaggagagaatgagagtggttcggattctggatgcatttttaaggtagacccataggatatgcyggatgaactggatcagcatgggaaaggaagtcagcggggactgccaggtttggggcccaaactccaggaaggatagagttgccgttttctgagaactgtagggggaataagtgaggggggtcaggaattcggttcagggagtgttttggttcagggtagtgatgttgagtagccgtgagatccttgactctggtgttcaggcagagatctgggccacagatataaacttgagaatcatgaactagacgttgacatttaaagccaccaggctggatgggatcacctagagattctcccacagtcacttgcacagactccctggcccatgttaacctccgaggccacattccttcaaagtatccccagtcccccacttaccctttccttctctccttttctcaccagcacctgccaggagaacaggcagtggcagtgtgaccaagaaccatgcctggtggatccagacatgatcaaagccatcaaccagggcaactatgggtgagaggccctagaggcaccctcagtgggcacacatgcatactcatgcatgtatacacgcatgctgtgctgtggggcacgtccagcaggccactcctacacccagatttgactgtgtgtgcgctcagccactgtgcgtctctcccacccacatgcacccacgccaaggaccctgagcctcggcagatctgtgacttccttccgtcccctctccttcagctggcaggctgggaaccacagcgccttctggggcatgaccctggatgagggcattcgctaccgcctgggcaccatccgcccatcttcctcggtcatgaacatgcatgaaatttatgtaagtccatccttccccacaatgctgccatctccccatggctcagaacctcagggatgctggccctgtgccctgctcctccaagggcctggaccatcccctactacaaggctgtgtgtccctggacaagttactccccttctctgggcctctgttccctgcttccacaggatgtgctgtgctggaagaactgatgctcagattgaatttcgtggtcttggcatcagctcccccctgatctctccagcctgggaaaaatgctgttggtctcagtacagctgggttagggcccaaggggacagggggtcaccttggtattttgggaagggaaggacacacactcctccagttctggccagagggcagcagttctcggaaataaatgccggttcagcggaaccccaagggaggagagggcttctcccttcccaccagtgggaccctctgggagaggaatgaaaaccaggcccaaagtgaaagggtgaggaaggggagcttcagcaggcctggaccgggacatgtgccggagcatttgtccatcagtggcaggcagcggggaggcaggggctggcaggagtggccctccctgcggagacttcggccttgggtgaccagaccctggccctgcccttattcccctgggcctctggctattttctgcctcttgctgtttgtgttggcagactgcctggtcacgggaccctactgcctcttccctcccctgagggaaagctaaggcctgaagaaagctaaggccgatcagaaggtgcagaggaaagaggcaggggttgagaatggaaagctgagggacctggcctggccacttctctgtgcctggcctcagctgcctcatctgggaagcaggactagtcaccaccgccaccccgccccgccccaccacctgatacctgggaggcactaaatggtgcttggttcttcaacacaagtcaaaattggaggcagctggaatcctgcagcagcaggagggctcaagattaaactgcagaaggccctggacttggtggccctccagtgccaatgggcacctgaggggcaggccagggcagagcaggaggcagacagggcaacctttatcttgcagacagtgctgaacccaggggaggtgcttcccacagccttcgaggcctctgagaagtggcccaacctgattcatgagcctcttgaccaaggcaactgtgcaggctcctgggccttctccacagcaggtaagccaagggcaagggctggcgcctgggagaggagggccaagtcctgagcctcccgacagcccctctatctcaccccaccagctgtggcatccgatcgtgtctcaatccattctctgggacacatgacgcctgtcctgtcgccccagaacctgctgtcttgtgacacccaccagcagcagggctgccgcggtgggcgtctcgatggtgcctggtggttcctgcgtcgccgagggtatgcagcaacaggggatgtgggcagagaagagggcaaggagctccgtgggcatggcctgggccatgatgcactgagtctttctgcctttgctccctcttgctgcctttgcagggtggtgtctgaccactgctaccccttctcgggccgtgaacgagacgaggctggccctgcgcccccctgtatgatgcacagccgagccatgggtcggggcaagcgccaggccactgcccactgccccaacagctatgttaataacaatgacatctaccaggtcactcctgtctaccgcctcggctccaacgtaagtcagcacttgggtgagggcgccgaggcaggagggttgtgaaagcctggagtctcacccctgacgtatgctctctgtccatcccctgccctccaggacaaggagatcatgaaggagctgatggagaatggccctgtccaaggtaaacccccttatccagcaccctggttccagaagcttgtgcctgcttgagagtgggcacagtagcacaagtggcctgcacagcattcagcagcatgtccagtagggccaggagtaggggtccccccctcccacaggcagcacctggagggagcacttagagctttggtatggagggaccctggtgcctgggcacatctcaatagactcaggctccagtgcctgtgccaacgggctgagtggaccctaccttgacatctgcccacagccctcatggaggtgcatgaggacttcttcctatacaagggaggcatctacagccacacgccagtgagccttgggaggccagagagataccgccggcatgggacccactcagtcaagatcacagggtgaggggcgtgtgggcagagggggtttgggacagcagggtttgtgctaggggctctggagcctgccttgggttcttacaacctctctaaaaagccaggactgctctcatcatttcaatagggagaaaactgagactcagaaagagaaaggacttgccctgggtcgaattgaaggttgggagcctctgaaggcttttttaggaactgttccttccttacattgggataaaataactccaatatgaagagagcctcaagagtttctcaacctctccccacctcagcacctgtcccagctctgcctgacccaccgagtgacctgggaggtcgctcccctggcctcagtttccctatccgatttagggaatatagatgttaggatcactgacttcaatgaactcggtgaaatgtgctttacngngggaattggcggtctctaagantacccatattctcagagtgtcttccttttgggccttggcacctacccctccctggatccccaagtgagggagggcaggtggatgtgtggtcccatagaactggcccctaggaggtgggtctctggaggacccaggttccctcctcttctgctcaccttgcctccacttgtccccttggtgccccaccccctcccatgctgggcctgggtgcaccgacttacagatgtgagagtgagggagatgcagagaggtacagagacctgcctgagccctaagggtgtacccaaccctccaaaggcaactgggggctggatggggcaggtttccgggattggagctcctgagagcaggtagacccagctcccttccccctcctctgctctgcccacagatggggagaggagacgctgccagatggaaggacgctcaaatactgggtgaggccgctgaccctttccccgccccctcttcccctcgccccactcccattccccttctcaccacccctccttattcccagactgcggccaactcctggggcccagcctggggcgagaggggccacttccgcatcgtgcgcggcgtcaatgagtgcgacatcgagagcttcgtgctgggcgtctggggccgcgtgggcatggaggacatgggtcatcactgaggctgcgggcaccacgcggggtccggcctgggatccaggctaagggccggcggaagaggccccaatggggcggtgaccccagcctcgcccgacagagcccggggcgcaggcgggcgccagggcgctaatcccggcgcgggttccgctgacgcagcgccccgcctgggagccgcgggcaggcgagactggcggagcccccagacctcccagtggggacggggcagggcctggcctgggaagagcacagctgcagatcccaggcctctggcgcccccactcaagactaccaaagccaggacacctcaagtctccagccccactaccccaccccactcctgtattcttttttttttttttttagacagggtcttgctccgttgcccaggttggagtgcagtggcccatcagggctcactgtaacctccgactcctgggttcaagtgaccctcccacctcagcctctcaagtagctgggactacaggtgcaccaccacacctggctaatttttgtattttttgtaaagaggggggtctcactgtgttgcccaggctggtctcgaactcctgggctcaagcggtccacctgcctccgcctcccaaagtgctgggattgcaggcatgagccactgcacccagccctgtattcttattcttcagatatttatttttcttttcactgttttaaaataaaaccaaagtattgataactacagtgkcttggaaacctctgggagtggaaagccaagccaaagttgggctggcagtggttagacagcagaaaggactgcctgaggtgttgctggttggcaggggtggggggactggaaatcctaacttccattcagccctaattgtcaatgccctgggcactgacccacttgggggaggggcatggatggcatggcctttggccctagagagaaacctgaaccgtgggaaccacctttcagacgctgagtcagctgccgcctgaagggggagccctgcactcctatcagctgaaccggtgccagtgcccagcaggcaaggggggcacagccctcagaagctggagcctctgtctctgtagatcagtctctcaagccatccaggcaaggggggcctctncctcggnctgctcttgggcc

SEQ ID NO: 22529 - DNA, 2522 bp, Homo Sapiens
atgtggttctttgcccgggacccggtccgggactttccgttcgagctcatcccggagcccccagagggcggcctgcccgggccctgggccctgcaccgcggccgcaagaaggccacaggcagccccgtgtccatcttcgtctatgatgtgaagcctggcgcggaagagcagacccaggtggccaaagctgccttcaagcgcttcaaaactctacggcaccccaacatcctggcttacatcgatggactggagacagaaaaatgcctccacgtcgtgacagaggctgtgaccccgttgggaatatacctcaaggcgagagtggaggctggtggcctgaaggagctggagatctcctgggggctacaccagatcgtgaaagccctcagcttcctggtcaacgactgcagcctcatccacaacaatgtctgcatggccgccgtgttcgtggaccgagctggcgagtggaagcttgggggcctggactacatgtattcggcccagggcaacggtgggggacctccccgcaaggggatccccgagcttgagcagtatgaccccccggagttggctgacagcagtggcagagtggtcagagagaagtggtcagcagacatgtggcgcttgggctgcctcatttgggaagtcttcaatgggcccctacctcgggcagcagccctacgcaaccctgggaagatccccaaaacgctggtgccccattactgtgagctggtgggagcaaaccccaaggtgcgtcccaacccagcccgcttcctgcagaactgccgggcacctggtggcttcatgagcaaccgctttgtagaaaccaacctcttcctggaggagattcagatcaaagagccagccgagaagcaaaaattcttccaggagctgagcaagagcctggacgcattccctgaggatttctgtcggcacaaggtgctgccccagctgctgaccgccttcgagttcggcaatgctggggccgttgtcctcacgcccctcttcaaggtgggcaagttcctgagcgctgaggagtatcagcagaagatcatccctgtggtggtcaagatgttctcatccactgaccgggccatgcgcatccgcctcctgcagcagatggagcagttcatccagtaccttgacgagccaacagtcaacacccagatcttcccccacgtcgtacatggcttcctggacaccaaccctgccatccgggagcagacggtcaagtccatgctgctcctggccccaaagctgaacgaggccaacctcaatgtggagctgatgaagcactttgcacggctacaggccaaggatgaacagggccccatccgctgcaacaccacagtctgcctgggcaaaatcggctcctacctcagtgctagcaccagacacagggtccttacctctgccttcagccgagccactagggacccgtttgcaccgtcccgggttgcgggtgtcctgggctttgctgccacccacaacctctactcaatgaacgactgtgcccagaagatcctgcctgtgctctgcggtctcactgtagatcctgagaaatccgtgcgagaccaggccttcaaggccattcggagcttcctgtccaaattggagtctgtgtcggaggacccgacccagctggaggaagtggagaaggatgtccatgcagcctccagccctggcatgggaggagccgcagctagctgggcaggctgggccgtgaccggggtctcctcactcacctccaagctgatccgttcgcacccaaccactgccccaacagaaaccaacattccccaaagacccacgcctgaaggccactgggagacgcaggaggaggacaaggacacagcagaggacagcagcactgctgacagatgggacgacgaagactggggcagcctggagcaggaggccgagtctgtgctggcccagcaggacgactggagcaccgggggccaagtgagccgtgctagtcaggtcagcaactccgaccacaaatcctccaaatccccagagtccgactggagcagctgggaagctgagggctcctgggaacagggctggcaggagccaagctcccaggagccacctcctgacggtacacggctggccagcgagtataactggggtggcccagagtccagcgacaagggcgaccccttcgctaccctgtctgcacgtcccagcacccagccgaggccagactcttggggtgaggacaactgggagggcctcgagactgacagtcgacaggtcaaggctgagctggcccggaagaagcgcgaggagcggcggcgggagatggaggccaaacgcgccgagaggaaggtggccaagggccccatgaagctgggagcccggaagctggactgaaccgtggcggtggcccttcccggctgcggagagccgccccacagatgtatttattgtacaaaccatgtgagcccggcgggcccagccaggccatctcacgtgtacataatcagagccacaataaattctatttaacaaaaaaaaaa

SEQ ID NO: 22530 - DNA, 6123 bp, Homo Sapiens
cgactggctggtcccctggccgtgagccggcttctgaatgatttatgccgccttgaacttgactccagcgtgacaggagtgagaagagccgctcccgctagaggaaagctggaaaccgtactgtgctcaccacataacctctgggtgctggaaatggagtattactactgccccagcctgctgaagctcttgcgctacctctgggaccagctgaagcagtgtttctcccggcagcccactgaacccaaggacactgacaccctcgtgcacgaagccggcagccagtatgggacgtggacagagcagtgccagagtggggagagcttggccactgagtccccagatagcagtgccacatcgacaaggaaacagccccccagcagccgtttgtcttctctgtcctcccaaacggagcccacctcggcaggggaccagtatgactgctccagggaccagcggagcaccagcgtggaccactccagcactgacctggaatccaccgatgggatggaggggccgcctccaccggacgcctgccctgaaaagagagtagatgacttctccttcattgatcaaacctcagtcctcgactcaagtgccctcaagacccgggtgcagctcagcaagagaagccgccgccgggcccccatctcccactccctccggcgcagccgatttagtgagtccgagagcagatcacctttggaggatgagactgacaacacgtggatgttcaaagactcaacggaggagaaatcacccaggaaggaagagtcggatgaggaggagacggcatccaaagctgagaggacccccgtcagccatcctcagaggatgcctgcgtttccaggcatggatccggcagtgctaaaggctcagctgcacaagaggccagaggtggacagtcctggcgagacccccagctgggcaccccaacccaagagccccaagtcccccttccagcctggggtgctgggcagtcgcgtgctgccttccagcatggacaaggatgagaggtcggatgaaccctctccccagtggctaaaggaattgaaatccaagaagaggcaaagtctttatgagaaccaagtttgaccaggcagggaacactgccacatctacgtaacagaagccttaaccatcagaacccgcagacgaggccgagctgctgccgtttcttcctgcacaacgcttacgtgcctgggcccttcccattggattgagaacgctatccagtgcccctgtcctcgccaggctctccctggatccagacgggaagacccaacctccaggagcactcgctcatctccccagacagcacttcaggctgggaaaggagccaggctgcccagaaacgtccatgtgggtggttttgctttttatgtaaaaatttgcatttctacctattttagacaccttcatcagctccaagaacatcagtgtgaggctggaattgtctccccaggttctgaaaaacacctgcatttgtgaaagcacctcctcacccgaccccggggcaggtctttttttggaaggacatttccaaggaagatcaaactgttcattttctgctgtagtctcggtgcagggtattaccgctgggttgaggttttctattctttttttttggtgagttccttcttccccttgaggaatcagcagttccaatttttaaacatactctccctgattatgtgtatttctctttctagtggggctgtgtgcatcgttggcctatgttattgtatgtcatttttgtttgctttagaaggcgataaagcaataattcagctaattttctttgaaacttgataggtatatatgtgtttacgttaaaggacaggaggaaagatgtgcgaataatttgttctgaagtatccagtcacctcaggttatcttatccctatccaagctgtttagaagttataattgtcactcttgtatttatttccatggcttcttttcatttgagctctggtttcagtagggtgacctttgccccttggccttaagggttcataaactgcagcccaagtggtggtgcctttgcttatgaatcatcagacctgccctagtaatctttttctccagagtcttctttgaacatgatgtgggctgctggcatggaggagttgttccaaactggcctcagaacagatgcatgaatgaagggtactttttgcttttgctcacctcattttccttcatctttcttgatgaatccattatttgcaaatgctgtcaaaacatgctttccttctccctggccacctctcaggagttcatttgtctctctatctcagcttcctccctcatcttcctttacccctcttctctgtcttagtgggtggatgggcatggatagaaatcctctgtttctttaggttaggataaacacctgggccctggtgaggcagttgctgttcagcaccagggacagcaactgcagggctgtgaggccggagcccaccttgtgtcctgttcgatgagctttggttactgatgagcaattgccagaccatgtcacccacccagccttttacacctgggagcctcatgcatctgggtttgggagtttggccctgctgatgatagtttgttttctcttcattccctgaattagtcatcagttctccgtggccatttggggattcatgcctgcaactgcttcagttgaattcttttttaaagatccagtttatgttttataataattttgatcttatggctttcaacgtcaataggatcccctttaaaaataccctgctagtgttttgttttgttttgtttttctgagacaaggtcttactctgttgctcaagctggagtggagtggcacgatcatagctcactaacacctgggctcaagtgattctcccacctcagcctcccaagtagctgggactacaggtgtatgctaccatgaccagctaatttttaaatatttttgtagagacaagggtcttaccatgttgcccaggctggtctcgaacttctgggctcaagcaattgtccctcctcagcctcccaaagtgctcggattacagacatgagccactgcacctggcctgaaacacattcctagtcttttgatcctgacttcttatctgggctgctgtctctctttccttcaggtggaaaggaccccttggtaccatctcaagcagtaggaaaggacctgctcttacatatattgatggtcctcatgcaaaactctcaattcttaattagtcatgtctcagctcaaggatatcagacaggaatgaaacacacttgaaaatgagattgacctggagattttttttccctaatctctcataccttaattggaaaaataatcaattaattctatgttaattaggatatacaaagttcaccctccttgaaagtgactagggcaagccctgaagatcttcctcacctccttttatttttctataaccttgtctcctccagcaccacagggaagacaatcacagtgggtcaagagcttcacgtgggctctgccatgacctctgagacctgcttatgatcagtgcaatgaagttagaagtaactgatgattgggagcctttgcagatagctgggcaaatgggtgatttacttatccccattctaaatggagtgagctctctttgaggctaagcaaggaggcgttgtatgctagtttctagactttgcctggagacccctttggaaatctgtcttctttttaaactcacttaatatgccttaatcatctgtgtgtaatggagtcatccgctcctcaatctaaccctcctcccctggggctttggctgtcctcaatgagagtttcatgcagaatggaaaatcctctatatgtacaatctctctccccctcatttctcttcctcctcacctccaccacccctttgcacatcagcattttaacagctggtcttttgagaagcctgtatccttttcctcttcagtagatacccttcttcatggtcctttgcctaatcaaacagaggcctttggcctttgaaaatccatgacaaggcctcagaaatcagtgttgtggaggattactccatgccaccggagaaactctggtgaaagagaaacctcgtggtctttaggatgttgggattttgagtgaacctgacctgatagcctcaggattcagggaaaggacaatcagatggcggtgttttccagggggacgcgccaaatcatgtggtttcagacaattgtgtttgcctttgtgcctccctggaagggaggccaactaagggtatcaccaagaagccaaaagagaaataggcatgagcctgtggttttaaactttacaggctgggcaaaggatttagaaagacccttagcatgattttcctaaaagagaccttagctgctccaacctggtgctgatagctgctttgttgatctatgctttaaaatttttctttataatgcccccagatggctcctggaactagtcgtaattgcaaactgtaaaaatccctcctccccagtgtagatatttaaaccagagtaagtgaggggagacattctgtggtctctgaatgtgccttccccctcatcgtgtgttaaaacacaaaagccgaagttccatggcgtcatgattccgaggggctggagggataggacccactccacatctaaaggggatctgctttgggctcggtcccattagcgagtgggggactcttgctgtgtgctaagaggctgctaggactcacccagttggaattctgggtgggctcaggaagtttagagccacgtaaaaagctggtaggcatgagtgtgccaggtctttgccagcctgcgtctccttttgcaccccccaatccagagtttgctttcttttgactaaattggctcctgcagggggaagggcagaaagctaggccctctgctctggaaagtcggcctgaggtttccggcaagttaacccttaaaatggacacccctcagcccgccctcccctttggccttcccagaatctccttcagtggttgctctcacacctgtgccataacatcatcttccatgacttggacgggcacttccttgacaattcctattggcatcacacgggctacaaattatgctgttttctaaagaatttgaacttttttttttttcttttcttgagacacggtcttgctctgttggccaggctggaatgcagtggcacaatcatagctcactccagcctccaactcctgggctcaagcaatcctctcatctccacctccagagtagcctagatgacaggcgcacatcaccacgcccagctgatcttttaaatctgttttgtagaaacaggatctcactatattgcccaagctggtcttaaacttggtctcaagtgattctactgcctcagcctcccaaagtgctgggattacaggcctgagccaccatgcccagctgaatttgagctttttaataatctcattccacatagccttatagatcctgtaaatagggggggtcacaaaagtaatatattgtgttatggaagataattttgtactgtgctgtttcctaaatcataccaatatcctaaagtcatgcacttcccagatgatcgtgatcctccaaatgctttgtaagatggggcagggcgtggaaatatatatatatacacacacacacagagacacacacacacacaagtatagtatatattttcctaacctttcttctgggtccttcctcagatctttgagtcacgatagaaaaggagctcgagttctttgtgtaggaaagttaagcttcctgcctgcggtgttcttgcaattgccttaggaattcacaagctctaggagttctgaacggaaggcagacgagaggcactttatccagtcccagaaagaatctctaaccgtgtgactgagaagtcatctagaaaaacttatatttttaatgtaaaaacaaatggggcttaccagacctcacagagtattggacgtctacaagtgcttttatattttgtaactgtaaagaagtttcatatgcacagaagagcagttggaaatctggtcgactgcaataaaacaagatgacctttgcatgtacaaagatgttgcattcagactatgaaaatagcaaataaagctttggtgcaagttg

SEQ ID NO: 22531 - DNA, 5765 bp, Homo Sapiens
gccatgtcctgcaatttatgtactatggaactatagagctgagtatgaataccgttcatgagattcttcaggctgccatgtatgttcaacttatagaagtggtgaagttctgctgctcttttctcttagcgaagatctgcctagaaaattgtgcagaaattatgagactcttagatgatttcggcgtaaacatcgagggagtcagggagaagttagacacctttctgctagacaactttgtgccactcatgtctaggcctgactttctgtcctatctgagctttgagaagctcatgtcttacttggataatgatcatctgagcaggttcccagagatagagctgtacgaggctgtgcagtcttggctgcggcatgatagaagacgctggagacataccgataccatcattcagaatatccggttttgcttgatgaccccaaccagcgtttttgagaaggttaagacatcagaattttatagatactcccgacagctccgttacgaagttgaccaagcattgaattactttcagaatgttcaccagcagcctttgttggatatgaagtcaagccgcatccgttctgcaaaaccgcaaactacagtatttcgaggaatgattggacatagcatggttaacagtaaaatacttctcttaaagaaaccaagagtctggtgggagctagaaggcccacaagtacctctgcgacctgactgccttgctatcgtcaataattttgtgttcctgttaggcggggaagagctgggcccggatggtgaattccatgcttcttccaaagtattcaggtatgacccgagacagaactcctggctgcagatggcagatatgtctgtaccacgctctgaatttgctgtaggtgttattgggaagtttatttacgccgtagcaggcagaaccagagatgagactttctattcaactgagagatatgacatcaccaacgataaatgggaatttgtggatccttatccagttaacaaatatggacatgaggggacagtgctcaataacaaattgtttatcaccggtggaatcacctcatcttccacctccaagcaagtgtgcgtgtttgaccccagcaaagaagggaccatagaacaacggaccaggagaactcaagtggttaccaactgttgggagaataagagcaagatgaattacgcgagatgctttcacaagatgatttcttacaatggcaagctttatgtcttcggtggtgtctgtgtgatcttgagggcctctttcgaatctcagggatgcccttctacagaagtatacaacccagagactgatcagtggaccatcttggcatccatgccgattggtagaagtggccatggtgtgactgtgctggacaaacaaataatggttcttggaggcctttgttataatggtcattacagcgattccatcctcacttttgatccggatgaaaacaagtggaaggaagatgagtaccctcggatgccctgcaagctggatggtttacaagtatgcaacctgcattttccggactatgtactggatgaggtcaggcgttgcaactaatgacatcctcctccctaaaaaaagaggcaaacaaagtatttgtttgcacagagtaattaattaaaacatataaagaaaaacctcaccagttttactatcaaagccattggtctaacattgtaagaatttttcattctgtgctagcatcctttttttcttttcagtggcctcaaactcatgcaataagttaattctaagtgctagctcttgaaactacttccagaagcagttgaatagaatgctccacttatctgggatattgattttctgctttaaacatttctttcagatgttagcgtaggagtcatgtgtcttctaagagaagacccgataagtgtcactggatgtgatttcagtctctgtctctatctgaaacctttttgaagatttatttcagtgtatttcagtctgttatactttttagttttattatttaaaagtttaaaactcttgacctttttgcatggctttttgctgaaaatgcaaaaatataaattttctacaaaattaactttttatattcaaaacactatttctaagctgccttctcttatccgcattgtgttagtgaaagcatattcatactcgcatacaacctataaatacacaaggcacatcccttttatgcgtggttaggattctatatttttaagctagtgcacttacttgcacacacagttcgccatacttgttgaattttagatgtaacgtcttttcacatattaacatttttagaaagttgaaataactggagtcctcatttgctatcaaagtagcctatcttcagtccatactgattcagtaatatttgaactccttatatttctgaaacatgtatggttatgaaaactaacaccttatattttattttcaaaagtaaatgttagtgttctttgtcgatgtatgtcttttctttttgaaaatgtttttctttgcagtctgtttaacgttaccctgtttttagtgagaatcggagtggtatatgacaagttctggccctgcagcatgcaagcacttttaaagagcatttaggtaataccagactcctaaatcaaggccccttaaaagtaagtgcaactcccattttttacattcagtaaggctgctgcatttgttattgaatggaaggtagaaactcttagaaaatttgacctcagttttgacttagaggtaagaaatagaattataatgttactggttttatctacttgtttattttgtacaaaatacccagcgacactagggatgtaagccctcagtttttgttttatttactgaaagctattagcatgaaggatagtaaccacaaagttcagaatggatcaagaatagctgtttaaaagcatttataataagtgttttaggattagctgcacctttcaactctttaaatgcagaggaaaaaacatagttgacaaagttaagcaagaataacctgggagtggatcattgaaattgatgccatttgcgcatgagtagtctatatctgatacagactagatctatactggcaaaacttgccagatcttagaatattggtgcaatattgcaatgccttctatatggctgctgatgtataaattttctagtttcactttgtttggtgttttttgtttttttgtttgtttgtttgtttttttgctgctgccaccattgaacataaaatggaagtgtgaagtcatggaaatgtgaagactttggtttttgggggttttttgggcagttattagacatactatgagattaaacctgatcttcaaactccagaattggaggcatttgggtttaagaaaccaggtacataagtagcttttgaaaaaaccattggcattgatttcaaaaatcaataataatcttattttatatatgagacttatattttcattaactagtcctgtcatttacttacagtttccaaacatgaaatttggtatcttgtttcccatggtaatatgggtaaaagtctttttctacatttaaaaaatacattattttatttttgaaagttaggaataagttagccatttaatttttttctacattagtttagtggctttgtatgtgtgctattttgctttaaagaaaataacgtcttcattattttcctcattgatgtcttttgctagaaaagaccaagaaagagccatcaggccaggtatccacatcaaagcctttacactatagtggtggttctctttaattgcttagatatgacttcatgaccctagtcagggtgacatctgggcaaacatttgagtattcttggtcttccattttaaagacagaggccaagatcaaagttcatgttttgtaaaattcgtaaaatcttaacttgaactaactctgggttcagctttacgtaagtcacgtcggacctgatgttagctgtaatcagttttgagctttaaggatagttgctgttgcttgggttctgaatgtatgagaaaactccctgtttatatgtagttctaatttaggttattttaaatccatgattaacttacattcccttttaaaattatggttttattgctgcaagagatttatttttgttatactaaactatggaaaagtttttcatagcatttttttcaagtttattttttgtgtgcttcatttggagtttttgtttatatacattgcgctcaaaaaagtagttttttgaaaaattcagtaagatttgaatctatacagtttaactgttatgacctttatgcgtgttgttttcactttatatctcaaatgccagagttcacaaaaatagctgatcttcattaattacatcttaattagaaccatttgttctcttccgtgtctttgaccttctaagttttgattttaaagaaattccttgcactacagccttttcttaaaatgcaagattctcactttgaaggttttgtgttggaagaaatgctactggtttttaaaaagcaaagcttaactaatagaattattagcttttcttgagacagctttctgtgtcctcattactctgctctgtgtgagtgttactagaatttgtgaaatactgactgagcccttcacttatcttttctaaagcagcacctttggacacctcattctgggaagcctgctcgagtcatagtaaaggacacacgctttatgtggggagaagtggtaaaaatggagttttgtcttaattacatgaaactaagctttaaaatattttataacagattatttgagctgcataatctaaacatgtcaaacgttcagtgggactatttttatatatgtatatgtgggtgtaggtcataacatttcagtttataatataaattgttatttcagtttataagctatctctcagaggagactagctcttttgagaattcataatttaaagttttagactgaagtaaaatgcaacatagataatagtgtaaatcagatataattgagggctatatggcagtaaaactgctagtgccagttttcttgtttgcctgttatacatttttgatttttgtttttgtattctgaacattttgagagatcatatgtttgttcaattacatttagagttggtttgggaataaatatcttctaaaaagagatttatcttaaaaatggaagtcctaaaaattagtttatccagagtttataaagtcaaatattcagtaggcatagactggaatagataaattcatggaaatcatatcctttcagtacaccgtataacttcaatattacacaagtaacattgaggagaatgccatcagctttgttctcccttaaattctttggttttctttttacattttgggaacaactgcatttaaaatgttattagtcagtatatagtaaggattaggtgtttgctttctgaaggaatggtccagtgaggtgattgggagaggttattttctacctaacttgtatatgccctatacctcttgggcatactttgtctatagaaaaatattttgacctttaggtacattttgggccagtagtcaaataatcctagggccgatataaaaatcttagaataatttaaggtttgccttttatacctgttttgaaagcctttacatttttgtcaggtaatttttcccaagccgtggatataatctattcaaacatgtttatgctatccattctgtttttaaattgaaaaaaatgttaaaagtgtttatgaagaaaagtttaaataaaatatttttaatcttt

SEQ ID NO: 22532 - DNA, 6992 bp, Homo Sapiens
gcagcggccaaggcggcacaccggagcctccgaggcgaggggcaagtgggcgaagggaggggggacgacggctgctgccgcagcagctgaaggccaaggaattgaaagggctgtagggggaggcagtgcgagccagccccgactgctcctcctcttcctcctcctcctccaaactcgcgagccccagagctcgctcagccgccgggagcacccagagggacgggaggcagccgcgcagccccgagctgggcagtgtccccagccgccatggatagcgacgacgagatggtggaggaggcggtggaagggcacctggacgatgacggattaccgcacgggttctgcacagtcacctactcctccacagacagatttgaggggaactttgttcacggagaaaagaacggacgggggaagttcttcttctttgatggcagcaccctggaggggtattatgtggatgatgccttgcagggccagggagtttacacttacgaagatgggggagttctccagggcacgtatgtagacggagagctgaacggtccagcccaggaatatgacacagatgggagactgatcttcaaggggcagtataaagataacattcgtcatggagtgtgctggatatattacccagatggaggaagccttgtaggagaagtaaatgaagatggggagatgactggagagaagatagcctatgtgtaccctgatgagaggaccgcactttatgggaaatttattgatggagagatgatagaaggcaaactggctacccttatgtccactgaagaagggaggcctcactttgaactgatgcctggaaattcagtgtaccactttgataagtcgacttcatcttgcatttctaccaatgctcttcttccagatccttatgaatcagaaagggtttatgttgctgaatctcttatttccagtgctggagaaggacttttttcaaaggtagctgtgggacctaatactgttatgtctttttataatggagttcgaattacacaccaagaggttgacagcagggactgggcccttaatgggaacaccctctcccttgatgaagaaacggtcattgatgtgcctgagccctataaccacgtatccaagtactgtgcctccttgggacacaaggcaaatcactccttcactccaaactgcatctacgatatgtttgtccacccccgttttgggcccatcaaatgcatccgcaccctgagagcagtggaggccgatgaagagctcaccgttgcctatggctatgaccacagcccccccgggaagagtgggcctgaagcccctgagtggtaccaggtggagctgaaggccttccaggccacccagcaaaagtgaaaggcctggctttggggttcagagacctggaatagaaacttggatctatgcactacgtttatctgacaatgggacaaccagggactgctcatgctgtgacgtcacatcctctcaccatgcgttagcaacgactttctcgcatactaactaggtttgactgtattactcataccagatttaaaattagctagccttgcaacaacgtcctactgagaggtattgtcgagcatttgacataagacagcgtgatgttctttggtggttcaagtctaaatctgtaccacattcggagatgccaaatgattagactgaaacagggaaacggggtttttcagtcatttttagtcagtggtttttccatagtgcttttttcctatggccagtgcaaattgtgttagcacacttgcatatgtgccgtattaagggttgacaattactacatctttattctctaaatgtagtataatttgccttttaacctttgatctgtatcttgcaatagaatggctttggtttttttcttagtaaataggagcccacttctaaagtcatttcacccctcagccctattctctttcttagataccctttacaagagaaaacttccaaatggatttttgcatcaatagcagtgtgtaggtctctctggttctttctatatcatcattttattattatgtcctaatataaagtactggctcatagggccagggtattattatagaatattattctcgcatgtaaacaaagatatctttgctttaagatgtgagaagaaatgaatttactttgtttgcattaagttatggaagagttgtaatatatactttaagaaagaagagaagaaaactagtatctctaagcggtaactatggcaattttgcaatattttcagtagtgctagtaattttttcctccttgagtacacattaaatgtacataacatagcgcggtcaggcttgtggcacagtgcattgaattcaaaagtcaaacagcaaatttgaattctaacagaattcaaaaaaaaatttttttagtcagtactactaaggcagacacactgattactaggtacaaatcaaaccttgatgctaaaactcttcatcattgtaatttcaaagcacttacctgcttcaaaacattgtaaactaagactgaacacctgtatagtttaaaagcaacactatcaatagcatttcagccattttgccagccatgtgtaatcacaactgcagaaataaggagaaaacccctgtttttttagtttagctaattagatctgtaacatcactgggattgctctgaatgaatcctgagagttttgttttttataagcaccctcaccacatgccatagctttgtctcttttagacacctcgatgcagcggctggaaggactggagagcagctgttgtgctgatctgtagctgtcagctgtgattcctgtcacctgagtcagtttggtctggaaagcgaaggccttccaagctgtagcagatagtgagctccagctgatgagagaaggcttcagtggaagaagagtgaggacataggcagaaggaagtttgctatttcttgtcagttgcacattgctttatgaagactacaacaaaagtgcttaatcccaggctgctcatgactttcatttcaggtggcccttgggcacattgacagagttgcccttcccttctttgcaacaccaggcttcctagagcacccggttgcatgctttgcagctaggtggcagtggtttcagggagatccagttggatccctgcttgaaagcttaagccaatggttcacccatgagaggaagttgtcagtgcttccaggaagattgcccaccaaaggaactgaatagtttttagatttaaaggcaccaggatagggtcactcttactctgtagaaagagaccgttctatacactgtgacggatgggccagggcctctggacttgcattctgataggtgctttaatttaaatgtgcccaaagggagtgactgtcttcaggagaaagatggcttgcattaacctcgatcaagtgggttgtgcagccaggtcagggaatgcggtcagggagaggatagtgctggtcatgcccccgatgcagctatgctctgaatgatttcattcctgagagtgatagcattctggtcctggctgcagtggggtacaatttacgtcctaagtgggggctactctaattatcccattcaaatggaatttttttcaaaattggatagaaggaattgaagagttgtaagtagtgattagtctgctaatcagttcttcagatgagatattgaatggtaacactctgagcttaaaactcagcagtgtgtctgtgacctccacgcaaatcagaggaagcaatgcatccacgctgagcctcaccatgtcttcctcccaactctcttcatactctctgtgtcttccagctcttctttctctggccggctctctttcctcttctctctgcatatgtgagaacgcctgggcatcctgggtaacagcagccccagctgccctctcctgttccctgttccaagtcccctgcactgacctttcttgagtctctctggctctgtgcatgtctttgggactctcctcatctggcttttcctctgtgtgtgcctctctgtttgcttatgtctctggctctgtcttccccacccctcccctcacacacacacatactcccaaatgtaaggctctgtggcaggttggaatcggagtaaggcttgagattcactgagttctgtaggtagggaaagaagtcaagggagtggaggttctataaggaattaacagctgaggacggaagggtttgtttcccgtttgaacctaaacgcaagtggaaaagaatactcagaatgtatttttctactttacatctgctggggaaggaaatgtgtcaggaagccgctgcatctggtcatttcatcgcatcagaatcacagcagacgtggaagattccatgtggtggggaataaagaaataactttatgctctcctgaaaaacagcgggagcctatgtgtgtgtgcgacactgtaatctcaaggagattcactcagagctgtctcagtccaactcctgcatgaccagatcttcccttagcatcttttctgtgatgaaatattatcttgtgttagagttaggaataggaactaacctgtaggagcatgtccccaaatggacatttgaatggactaacaaaaacaactggaaagactgaatttccgacacaaaggaatgatgagatcaaaaagaaagcagtgaggagttcttgagtcttgtagtacctattcttattttaacttgcttcatccttgatctacctgagacactaagaaggaaattagttttccaagagctctttgaacctgtctaggactgtagttaaacctatttgccctatgggggttcttcacactcgaaaaactatttccttatcaccaacgacccacccagaaaggccaatgaggccaaatgtaacaatttttaacatttaaatataactattaaaattgcattaattgtgaacagtgaattaaagggttgtcttctccaggagacagtatgtggcacttttcgtaaatttcatttaatatataaaaatttaaatcactcactgcaacatgcatttaaaatcttccaagaaggtagaggtatcattttctgttttgctttgttttaaaacagttgcctcaagcttctgtcttaagagtagtgacttagaatccagatatcttttgttttagaaaaacaagcaaaactatgttgcaagactgacagttgtaatgtttatttgccacagatcaaaggttcacaaagtatatcaaatttacatctacttggggtaccttgatagattattattgtttttcttttatctttcccttcaggaatttggaaactcgttgtcactttttttaattttaaaaatactaaattgtaatagttttcttttgccaaatgtgtgcgtacatattcaaagcaatgaaactatttcaagccatacaaccacaggggtgggaacccttttcacaaattttaatgtgtttgtatgtaaatagatgtttgtatgaaatattttcatgatagaatgaatatatttaaatgaagttgaattattccagtgctacttaaacacattacaaaaattttggtgagaattatctgagtctattgagatgtaatgcagatcaattttgatttttaaaaatcaaaagcctacaataactctgactctcagcaacttcctcggcgttgttgcacctgacgtggagagagctcgtaggcttccccagtgcctcagccgcttcctggtggaagttaggtgctaatggaggtgtgttcaccttttagtgatatcactgcaggcctttgaggggcctgagagtgaatcagaggcattagagacaccggtgcagttatctggagcacaatttctttgcagggcagcagaatcagaagccagacttggccatgtgaacctcgaaactcggtttcccggccgccatcaaccgccacccttactgcctagtcacacacgtcagggaggctgccctcagtggagttggggttgagaccccagggtgggacttcacagttttgccagcaatctctaccttctgacttctgcctcgcagagaggaaggagaggggagcatctggcaaggggcccatttctcagcacagtacatttcctgtctcagctctggaagactatgcacccaagcaccaaacttccaaccagagagagagacgtcctccgataacaaaaatccttgcttcctctgtctgtgactttacacacagttgttcaaagttgttaaatgtcaagagtcaatcacatccctaggacatacctcccaactctcctgactcttatgttattgaaaaaacaaacaaacaaaaactcctttatgatgatattcaacttgagtggggttttttttccactttggtcctggatataatgaaatgatacatattaggataaattttcactgtgtatagtagcaatacgaacacacatgccaatgtatcaacatatctacttggttacattttggtttatgataattaaccttgattcatgtattgggaagctacagggactacgtaatacctgcttatcacataggaaaattatgtccatgattctgagctcccttcttcaaaagtttcctcctgggtgttctatgttctctctttatcctgaaatacatttattaggttgtgaggtatgttgaagaagtagaagccaggggtatgctttcagcatttattgcaaccaaaagttaaccccatcacggttaacgagcatctttggtctcttgtggaatttgaactaaaactatgagccttattcaatatctataattctatgatttttttaaattatgggaaattaatgaaagatgtttacatgaataatgtttgcccttactgtgttatgaatgagttttttgtagtgtgtctgggtgcatgatgcaagagagtaggaaaaatgtttctgaaacaaaacttgacaaatatttgtaatgaaagtaaatttaaagattgctataattgcgctatagaaacaatgcaagtattaaacaaaatatacaatc

SEQ ID NO: 22533 - DNA, 7692 bp, Homo Sapiens
atgatgatggcaagaaagcaagatgtccgaattcccacctacaacatcagtgtggtgggattatctgggaccgagaaggaaaagggccagtgtgggattggaaagtcttgtttgtgcaaccgcttcgtgcgcccgagtgctgacgagtttcacttggaccatacctccgtcctcagcaccagtgactttggagggcgagtggtcaataatgaccactttctctactggggagaagttagccgctccctggaggattgtgtggaatgtaagatgcacattgtggagcagactgaatttattgatgatcagacttttcaacctcatcgaagcacggccctgcagccctatatcaagagagctgctgcgaccaagcttgcatcagctgaaaaactcatgtacttttgcactgaccagctggggctggagcaggactttgagcagaaacaaatgccagacggaaagctgctggttgatggttttcttcttggtattgatgttagcaggggcatgaataggaactttgatgaccagctcaagtttgtctccaatctctacaatcagcttgcaaaaacaaaaaagcccatagtggtggtcctgactaagtgtgacgaaggtgttgagcggtacattagagatgcacatacttttgccttaagcaaaaagaacctccaggttgtggagacctcagcgagatccaatgtaaacgtggacttggctttcagcaccttagtgcaactcattgataaaagtcggggaaagacaaaaatcattccttattttgaagctctcaagcagcagagtcagcagatagctacagcaaaagacaagtatgagtggctggtgagtcgcattgtgaaaaaccacaatgagaactggctgagtgtcagccgaaagatgcaggcctctccagaataccaggactatgtctacctggaagggactcagaaagccaagaagctgtttctacagcacatccaccgcctcaagcatgagcatatcgagcgtaggagaaagctgtacctggcagccctgccattagcttttgaagctcttatacctaatctagatgaaatagaccacctaagctgcataaaagccaaaaagctcttagaaaccaagccagaattcttgaagtggtttgttgtgcttgaagagaccccatgggatgccaccagtcacattgacaacatggaaaacgaacggattccctttgatttaatggataccgtccctgcagagcagctatacgaggcccacttagagaagctgaggaacgaaaggaaaagagttgagatgcgaagggcgtttaaagaaaacctggagacttctcctttcataactcccggaaagccttgggaagaggcccgtagttttattatgaatgaggatttctaccagtggctggaggaatctgtatacatggatatttatggcaaacaccaaaagcaaattatagataaagcaaaggaagaatttcaggagttgcttttggaatattcagaattgttttatgaactggagctggatgctaagcccagcaaggagaagatgggtgttattcaggatgttctgggagaggaacagcgatttaaagcattacaaaagctccaagcagagcgtgatgcccttattctgaaacacattcattttgtgtaccacccaacaaaggagacatgccccagctgcccagcttgtgtggacgctaagattgagcacttgattagttctcggtttatccggccgtctgaccggaatcagaaaaattcactctctgaccctaacattgatagaatcaacttggttatattgggcaaagacggccttgcccgagagttggccaatgagattcgagctctttgtacaaatgatgacaagtatgtgatagatggtaaaatgtatgagctttccctgaggccaatagaggggaatgtcaggcttcctgtgaactctttccagacgccaacatttcagccccacggctgtctctgcctttacaattcaaaggaatcgctatcctatgtagtggaaagtatagagaagagtagagagtccacgctgggccggcgggataatcatttagtccatctcccccttacattaattttggttaacaagagaggagacaccagtggagagactctgcatagcttaatacagcaaggtcaacaaattgctagcaaacttcagtgtgtctttctcgaccctgcttctgctggcattggttacggacgcaacattaatgaaaagcaaatcagtcaagttttgaagggactcctggactctaagcgtaacttaaacctggtcagttctactgctagcatcaaagatttggctgatgttgatctgcgaattgttatgtgtctgatgtgtggagatccttttagtgcagatgacatactttttcctgtccttcagtcccaaacctgtaaatcttcccattgtggaagcaacaactctgttttacttgaactaccaatcggactgcacaagaagcggattgaactgtctgttctttcataccattcctcctttagcatcagaaagagccggttggttcatgggtacattgttttttattcagccaaacgtaaggcctctttggctatgttacgtgcctttctttgtgaagtgcaggatattatccctattcagcttgtagcactcactgatggcgctgtagatgtcctggacaatgacttaagtagggaacagctaactgagggggaggagattgctcaagaaattgacggaaggttcacaagcatcccctgtagccaaccccagcataaacttgagatctttcacccattttttaaagatgtggtggaaaaaaagaacataatcgaggctactcatatgtacgataatgctgccgaggcctgtagcaccaccgaagaggtgtttaactccccccgggcaggatcaccgctctgcaactcaaacctgcaggattcagaagaagatatcgagccatcttacagcctgtttcgagaagacacatcactgccttctctgtccaaagaccattctaagctctctatggaactggagggaaatgatgggctgtctttcattatgagcaattttgagagtaaactgaacaacaaagtacctccgccagtcaaaccaaagcctcctgtccattttgaaattacaaagggggatctatcttatttagaccaaggccatagggatggacagaggaagtctgtgtcttctagcccctggctgcctcaggatgggtttgatccttctgactatgctgaacccatggatgctgtggtgaagccaaggaatgaagaagaaaacatatactccgtgccccatgacagcacccaaggcaaaatcatcaccattcggaatatcaacaaagcccagtccaacggcagcgggaatggttctgacagtgaaatggacaccagctctctagagcgagggcgcaaggtttccatcgtgagcaagccagtgctgtacaggacgagatgcacccggctggggcggtttgctagttaccggaccagcttcagcgtggggagtgatgatgagctggggcccatccggaagaaagaggaggatcaggcatcccagggttataaaggggacaatgctgtcattccatacgaaacagacgaagacccgcggaggaggaatattcttcgcagcctaaggaggaacactaagaaaccaaagcccaaaccccggccatccatcacaaaggcaacctgggagagtaactattttggggtgcccttaacaactgtcgtgactccagagaagccgatccccatttttattgaaagatgtattgagtacattgaagccacaggactgagcacggaaggcatctaccgggtcagcgggaacaagtctgagatggagagtctgcagagacagtttgatcaagaccacaacctggacctggcagagaaagactttacggtgaataccgtggctggtgccatgaagagctttttctcagaactgcctgaccccctggtcccgtataacatgcagatcgacttggtggaagcacacaaaatcaacgaccgggagcagaagttgcatgcccttaaggaggtattaaagaaatttccaaaggaaaaccacgaagtcttcaagtatgtcatctctcacctaaacaaggtcagccacaacaacaaggtgaatctcatgaccagcgagaacctctccatctgcttctggcccaccttgatgagacctgatttcagcactatggacgccctcacagccacgcgcacctaccagacaatcattgaactctttatccagcagtgccccttcttcttctacaatcggcccatcaccgagccccccggcgccaggcccagctccccctctgccgtggcttccaccgtccccttcctcacttccacgcctgtcacaagtcagccgtcgcccccacagtcgcctccacccaccccccagtccccaatgcagccactgcttccctcccagcttcaagccgaacacacgctgtgagccaccaagacctggggcgacaggagaaccggtcctctctctgacggggtggcatttggccttgaacaaaaccaagtccactggggacagaggcaggggcaagtggctctccccattaccttctcaagacctcagtgggagcaccagccaatggtaccatcggctgggctgccaggtaccctgggcctggcgctgcagacctgagctggcttggacccatttgaggactgaactaggcaggcaatggctccagtgccctccctctgttccctggaccaccaccccacgtagctgctcacaccagcctccgggtgcctccctctgcttgtacagagcccatggtcgggacagtgccctggcctttgccggggaggaggatgctctgagattcagggtggggctggcaacccctgaagagaacacttcctgttggtctgtctcttcccaccttccatctgcacacacccccaaggtaagggtacagcccggctggcggcctccttgggaacgtgtaggccacggctctgccaccactaggtacctgctgagggcgctggctctgcagatcagaacaacggaggatagctttgtgcctggacccagagagtgtgggactccccgcttcatccccaccgtcccactccacagccttcccgaaacattccctggcaaacaaaggaacactaggagaaaaaatggaaaaacccttccagtaattaaaaaggaagaaaccacagaaagaaaactacagacctcaagattccactctgtgcccgcctctgccgggagggagggaggcacacaggtggagctgaccctcgtctttgtggcagcaaaaccaggatgcctggagctgtggcctgagggcctgctggggtcccactcacccacttaggtctagtcgctagatcccccgttttcccaagaagagggttcgagcccttggtggggacagctggggagatggcagtgcaggctggaacctgggctgccccagaacacagtccattacgatagaaacactaggcaccccccaggcgagagctagtggggtgcagagggccccatgccagacagcccttggggctcgttgcactttaagaaataggatctgtggtgtattccagggggcctgatggacacctttcccgggcgtctgcagctgccctgcccgtgcccgcctgcagtggttggagacgggagtggcccttcggctcccgagctccctctggggacggctggctcactgtctccagttctcaatggccaacgaaggtgcttggaaacacctaaccttgcaagttttaccgccttttgaggaacacaaatcggagaacaaacccagggttcaggcgtgttttctgtgaatgttggatgatgaatttttgtctcttctggtggagctgtgcctggccctgtaggcccagggttggctggaaggtgacatctgtgtttcgttttagctgaggttggcagaaacgttcccaaactcccccagccctggaccccagcagatgaggaaacggccccatttactgaccccgcccccttttcgaggttatgctcacctggtcagctcctcacgtaattgggggtggagggaaagcatggtggtgccctgggccgtccctgtgtgaacgcaggcaaaagcagcccagtccccctcactgcttgagctaacactgccacctcttttgtgtgagcacaaaagccacgtcccaagccacctggcccgattccacagatgtatgtgcggccagtgacttccccaggagtgtggagggggtggtgaggaggagcacctgggctctctacccctctcctcacagaagtacctgaaactaggtctggggcactcccaatgcagcgccttgtcagccaaggtgggcaggcagggactgtggcagcttatgtccaaagggagcccccatgcacaggaagccacagggttcctcttgtttcccccgctaacttcagcctctcatctgctgctccgggctgagggactagaggacatctcggtcgtttgaggggcatggccagtcgtggcaggccggccttcagcgtccggtcagggaagcgtgcagcccaaatgggcacttgcatgggagccacagaggagcgtccctggggattgttgggaccatgctgcccccactcccgcttttgttggggctctaagttctggaaggtgtgtgcacagagggtgctcatgggactcgcatgcagctctcagcactgggtgggagggcgttggcttgtccagaatggggacgtggggcagccacccctgcccagcgagagcgcagacaccgtgtgaggggacagcagcccttggtgcaaagccagagactgatcctggctctgacggctgaagagggaagacccaaggctgggtggcgtggctcgtgaatccacttagaattcttggcttgtgtcgcatactgggtgtcacggcacacatttactctgcattgtccccgtctttcccatcgcctagcgtttggggaggaacagggagagagcttcggggcgtctgtctccgtgctctcctgcctccaccgccttggttttgcttcctgctggaggcagggcacctgctgcgacccagattcttctgcaggatgtgtctgtctttgtcacggtggacagagggtgacatcataggagcagctcgctggccagaaggggatgggggcatccctgtgcctcactcagctcctgctgctcttagggaaaggaggcctgggtcaagccagcatccccttggtaaagacccccgcaggccaccaggcattctggacacacacacacacacacacacacacacacacaaaacttcacagcaggccagctgcagtgacttgtcatcaagagtcacctcagctgcgcccccctcccatcctttcctatgagaagccactgctttgggggcgccggctagaaaaagtagggtgcggtggccaggagggcccctgccgcgcggggggctgggtctggttgagtcgctgctttcccgagggcagcgcagggatccggggaagctgcggcagggagcgggcgccggcttcgtggctctgaggtgtaacgggggtgggctccctccctcggaggacatcgtctgtgtccaggtcagaaagtggcccaggaagggggcagtttctgtcgcgggtccggtgggggcgcggccgc

SEQ ID NO: 22534 - DNA, 6585 bp, Homo Sapiens
ccaccctggaaagcaaggacagtggaattatagccacaattacaagttcatccgaaaatgatgaccggagtggctccagtttggaatggaataaagatggaagcctaagattaggggttcagaagggagtgcttcatgaccgcagggcagataactgctccccagtggcagaagaggagaccaccgggtcagcagagagcacgctgcccaaagcagaatcctcagctggagatggtccagtcccttattctcagggctccagctcactaataatgccacggcccaactcagttgcagcaacaagctcaaccaaattggaagatctgagttatttagacgggcagagaaatgctcctctacggacgtcaattagattaccatggcacaatacggccggaggtagggcacaggaagttaaagcacgatttgctccctacaagccacaagacattttgttgaaacccttgttgtttgaagtaccaagcataacaacagactctgtgtttgtgggaagggattggctctttcaccagatagaagaaaacttgaggaacacagaactggcagaaaacagaggcgcggtggtggttggcaatgtgggatttgggaagacggcaatcatttccaagttggtggccctgagctgccacggaagccgcatgaggcagattgcttccaacagcccgggttcatcacctaaaacctctgaccccactcaggatcttcatttcactccgttgctttcaccgagttcttccacaagtgcttccagcacagctaaaacacctcttgggtctatcagtgctgaaaaccagagaccaagagaggatgcagtgaaatatcttgcttctaaggtggtggcctaccactactgccaggctgacaacacgtacacttgcctggtgcccgagtttgtgcacagcatcgcagctttgctctgccggtcccatcagctggccgcctacagagaccttctgataaaggagccccaactacagagcatgctgagcctccgatcctgtgtgcaggacccggtggcagctttcaagaggggagtgctggagccactcacaaacctgagaaatgagcagaaaattcctgaagaagaatacattattttgatagatggcttaaatgaagctgagtttcataaacctgattatggagatacgctttcttcatttattaccaaaattatttctaaatttcctgcctggttgaagttgattgtgactgtaagagcaaattttcaggaaatcataagtgcgctgccatttgtcaagctttccttagatgacttcccagacaacaaagacatccacagtgacctgcacgcctacgtccagcacagggtgcacagcagccaggacatcctcagcaacatctccctgaacggcaaggccgatgccacactcattggaaaagtgagcagccacctggtgctgcggagcctcggctcctacctgtacctcaagctcaccctggaccttttccagaggggccacttggtcattaagagtgccagctacaaggtggtgcccgtgtctctctctgagctctatttgcttcagtgcaacatgaagttcatgacccagtccgcctttgagagggcacttccgattctcaacgtggccctcgcatccctccaccccatgacagacgagcagatctttcaggctattaatgctggccacatccagggggagcagggatgggaagactttcagcagaggatggacgccctctcctgcttcctcattaagaggcgagacaaaacccgcatgttctgccacccgtccttcagggagtggcttgtatggagagcagacggggaaaacacggccttcctgtgtgagcccaggaacgggcacgcgctcttggcattcatgttctcgcgtcaggagggcaagttgaaccgccagcagaccatggagcttggccaccacatcctgaaggcgcacattttcaagggcctcagtaagaagacgggaatttcttcaagccatctccaagccctgtggatcggctacagcaccgaggggctgtccgccgccctggcctctctcaggaatctctatactcccaacgtgaaggtgagccgtctcctgattttgggaggggccaacgtgaactacaggacagaagtgttaaataatgccccaatcctgtgcgtccagtctcaccttggccacgaggaagttgtcactctgctcctggaatttggtgcctgcctggacggaacgtcagagaacggcatgactgccctctgttacgcagcagctgctggccacatgaagctggtgtgtctgctgaccaagaagggagtgagagtggaccacttggataagaagggccagtgtgcgcttgtccacagtgccctacggggccacggtgacattctccagtacctgctgacttgtgagtggtcgccgggtcctccccagccaggcaccctgaggaagagccacgccctgcagcaggcgctgaccgcggcggccagcatgggccacagctcggtggtccagtgcttgctggggatggagaaggaacatgaagtagaagtcaatggcaccgacacattgtggggagaaacagccctgactgccgccgcaggaagagggaagctggaggtctgtgagctgctgctggggcatggagctgctgtgtcgcggacaaacaggagaggggttccacctttgttttgtgcagcacgccaggggcattggcagattgttagactgctgttggaacgcggctgtgatgtgaacctaagtgacaagcaaggccggacgcccctcatggtggctgcttgtgaagggcacttgagcaccgtggaattcctcctttcaaaaggtgcagccctttcttctctagacaaagagggtctgtcagcattaagctgggcttgtctgaaaggtcacagggcagtggtccagtatctggttgaagaaggagctgcaatagaccagacagacaagaatggccgcacacccttggacctggctgccttctatggcgatgccgagactgtgctgtacctggtggagaagggagccgtgatcgagcatgtggaccacagcgggatgcggcccttggacagagccatcggctgccggaacacatctgtagtggtggcgctactcagaaagggagccaagttaggaaatgctgcttgggcgatggccacttccaaacctgatatcttgattatacttttacagaaattaatggaggaaggaaatgtgatgtacaaaaaagggaaaatgaaagaggcagcccagaggtaccagtatgccttaagaaagtttcctcgagaaggattcggagaggacatgagacccttcaatgaattaagggtttccctctatctcaatttgtcgcgatgccgaagaaaaaccaatgactttggcatggcagaggaatttgcttccaaggctctcgaattgaagcccaagtcctatgaagccttttatgccagagcaagagcgaagagaaatagcaggcaattcgtggcagctctggctgacctgcaagaggctgtgaaactctgtcccaccaatcaggaagtcaagaggcttctggcccgcgtagaagaggagtgcaaacaactccagaggagtcaacagcaaaaacagcagggcccgctaccagctccactcaacgactccgagaacgaagaggacaccccaacccctggcttaagtgaccactttcactctgaggagactgaagaggaagaaacttctccccaggaagaatctgtttccccaactcccaggtcccagccatcctcatctgtcccttcctcatacatccgaaaccttcaagaagggttacagtccaaaggaaggccggtatcgccacagagcagggcaggaatcggcaagtccctgagagagcctgtggcccagccagggctgctcctgcagccctccaagcaggcccagatcgtgaaaaccagccagcacctgggctctggccagtcggcagtgagaaatggcagtatgaaagttcagatctcttctcagaaccctcctccaagtcccatgccagggagaatcgctgctgctcctgctgggagcagaacccagcatttagagggaacgggtactttcactacaagagctggttgtggccactttggggatcggctgggccccagccagaatgtccgcctgcagtgtggtgagaatggccctgcacaccctttaccaagtaagacgaaaaccacagagaggcttctgtctcattcctccgtggctgtggacgcagcccctccaaaccaaggtgggctggcgacctgcagcgacgtgcgacacccagcttccctcaccagctcaggctcttctggttctccatccagcagcataaagatgtcaagttcaaccagtagtttgacttcgagcagcagtttttcagatggcttcaaggtccaaggaccagatactagaattaaagacaaggttgtaacccacgttcagagcggtacagctgagcacagaccccgcaacacgccgttcatgggcatcatggataagactgcgaggttccaacagcagagcaatcctccaagccgcagctggcactgtccggcaccagaggggctgctgacaaacacgtcttctgcagctggcctgcagtctgctaacactgagaagccctctctcatgcaagtgggaggatataataaccaagccaaaacctgttctgtttctaccctgagtgcaagtgtccacaatggggcacaagtgaaggagctagaagaaagcaagtgccaaattccagtccactctcaagagaacaggataactaagactgtttctcatctgtaccaggaaagtatctccaaacagcagcctcatattagtaatgaagcccacaggagccacctcactgcagccaaaccaaagcgatcatttatagagtcaaatgtgtgaaccttaagaaagccccatttgtggaatttggaaacgtgtgttgactcctggtggtaaattaaatagtttttttcatcagaaaaattattttttagccattttttttctttggggtggatctgatgccattgatatatctaaaatgtgggataaaacttctttaatagctagaaatcaccataaataagaatgctaaacagaattgaaaattatatcaacttaaaattttaagacagcccagaagacattaatgactctcacttatgaaattgtttggcttttgccactttcctccttgcctttgctatatggtagaatcacagaacttacttagagaataaatatgtctattgttcaagagtaacaggtttaactcatgaccaagtgatgtacatccaagtgatgtattctggaaacgatggaattttacagttacagttccattgagtcaaatcccattttatatatacataaaaattaagttctgagtgagttctagctaaatataagtgcgactgtaaacgcagccaatttttttaagcagaatatgagaacacctaagtattctcttcatagcagttcctataaagggattaaacacttatttctgtgttatggttcttattcatatatttttatagcacctttttttggaacctatatttgtgcttgaaggtgtttttgatatttggaaacagtataagccatttggagtcatgattggtggtcaagtggattcaagctaaaatactaagaccagcattcttagtggcgcttataaattagctctcacctggtttccaaactgcttttaacaatggtagtgctcctggaacaatccttccaagctcctctaaggacaatatttaattcagatactaaaggtaagactggttgttacttttgttttgttgtacaattagtactttatagtcacatgttgtatatattaaatagcccagttttattcagacttgtaaatagaactatttcaatgtagttaatctaaaaacaaaaaagaaaccccagtcacgatttgcatgttctctgtaagcttcatccatgctggttattgcactgaatgatatattattagggcatgttaacagtataccagtaacagcactttatctcatttatatgaacacctttgaggtgctacttaagtccaagctctgatgtattattcatttgtaaagataaggtacaggaatgaaccttggtttaaaggtatttttatatgaaaatggtgtgttattggaagatgttaaagtgctaatttgagagaagtaggagtgtatctgttttatatgttgggatgtgaaatttattttctaaaattgaggagaaggaagttatatatttgcagaatgttttaaagtgaattgttgtaatgaagttcctgtgaacatcattatggttttgtacaaataggaacctctgatgtcattcttcaacgtttgttcctgtgtgtacaattgtactttgtatgaacagctttatcatttttataggctttccatgagttttgctgtaactactatggcttatttattttctttaatatttgtgaaagtcttactcctttgttagttttgtttctgcacaactactgtacttttccatatggaataaagactattaatag

SEQ ID NO: 22535 - DNA, 4816 bp, Homo Sapiens
tacactccagtcatggcggcccgacaggccgtgggcagcggggctcaggagacatgcggtctggatcggattttggaggcattgaagctgctgctgagcccgggaggctcgggctcaagttcactacaggtcacaaaacatgatgtcttgttggctactttaaaatctaacctgtctgctttggaggacaagtttctgaaggatcctcagtggaagaatctgaaactcctaagagatgaaattgctgataaggcagaatggccacaaaactctgtggatgtcacttggagttttacctctcaaaccttgttgttgcttttgtgcttgaaggaaaccatgatccgccttgcagctaatttcaatccaggtaaacccaaccctaggactccggaagttgctcctgccctgagccccgatgcacttagtatctcacaacagaagactgtccagttcgttttgcagtttgtagttaccttgggtatctgcccctatctcatgcctggtgttggagtccctttgagatatagaactgaatttggtgccgtcgttcaagacgtggtgtgttttgatgctgcccccgatgcaactcgaagactgtacaccagctgcaaggcccttctgaatgttgctcagcacacatctctggggagcttgatcttctgccaccactttggggatatcgcagcaggtctgtgccaactgggattctgcccaaccaaaagaaaactgctaacacctgcagaagaggttctaactgaagaggagagaaccctatccaggggggccttgagagacatgctggatcaagtctatcagcccttagcagtccgggaactgcttatcctccagggaggaccaccccagtcctgcacagatgtgaagacacagatgaggtgtcgggccccagcttggcttcggcgtctatgtggacagctgctctctgaaaggttaatgagacctaatggtgttcaggcagtagtccggggcattttggaaggagcaggtgcgggagcagctggtggaagtgatgctgaggtgacggctgctgactggaagaagtgtgacctgatcgcaaagattttggcctcttgtccccagcagtctctttcaccagagaattactacagggacatctgcccccaggttctggatttatttcactttcaagataaattgacagcacgacaatttcagagagttgccaccactacctttataactttgtcaagagaacgcccacatttggcagcaaagtatttgctccagccagtgttagctcctcttcatcgatgtttgaatacagcagagctttcagagagtgacatggtaccaggaactattttggtgacagaagaagaacttagtagatgcattgaggatgtgtttaaggtgtacgtggttgggaatgaacctttaacagttttgatggattccctgcttccagtcctgggagtgctttttcttctctactgttttactaagcagagtgtgtctcacataaggtcactttgccaagaaatcttattatggattctggggaagctggaaaggaagaaggcaattgccagcctgaaaggatttgcagggttggacaaagctgtgccctctctccattctctgtgtcagtttagagttgccactcaaggtggcattatgattaccatcaaagaggccattagtgatgaagatgaagatgaagccctgtaccagaaggtatcctctgagcagggccgggtggagcatctcggggacttgctgtcccactgccaggaatgcggtttggcaggagacttcttcatcttctgtttgaaagagttgactcatgtggcctcggaaaatgaaacagagttaaaaactgagcccttctccagcaagagcctcttggaattagagcaacatcagactcttcttgtggaaggccaagagcggaagctgcttgtcctgcagctgatggctgttctgtgcgagagaatgtctgagcagatattcacaaacgtcactcaggtggtggactttgtagcagcaacattgcagagagcctgtgcaagcctggcccatcaggcagagagcaccgtggaatcacagacgctgagcatgtccatggggctggtggctgtcatgctaggaggagctgttcagttgaagtcaagtgattttgctgttctgaagcagttgttgcctctgttggagaaggtatccaacacataccctgatccggtcatccaagaactcgctgttgatctccgcatcaccatctctacccatggagcctttgccactgaggccgtcagcatggctgcccaaagtacactgaacagaaaagatctggaagggaaaatagaagagcagcaacaaaccagtcatgaaagacccactgatgtagctcatagccaccttgaacaacagcagagccatgagacagccccccagacaggcctgcagtcaaatgctccaatcattcctcaaggagtcaatgagcccagcactactacaagtcagaaatctggaagcgtaaccacagaacagctccaagaggttcttttgtcagcttatgaccctcaaattccaacacgggctgctgccctgcgtactctttcccactggatagagcagagagaagcaaaagcccttgagatgcaagagaagcttctcaagatattcttggaaaacttggaacatgaagacacttttgtatatctatctgcaattcagggggttgccctgctgtcagacgtctatcctgagaaaatcttgccggacttgttggctcaatatgacagcagcaaagacaagcacacaccagagaccagaatgaaagtcggggaagtccttatgcgaatcgtcagggcattaggagacatggtctcaaagtaccgagaacctttgatccataccttcctgaggggagtgagagatcctgatggtgctcacagggccagcagcttggccaaccttggggagctgtgccagaggctggactttctgctgggctccgtggtccatgaggtaacagcttgcctgattgctgtggccaaaacagatggtgaagttcaagtacgcagagctgccatacatgtggttgtgctgctgcttcggggactcagccagaaagctactgaggtgctgagcgccgtcctcaaggatctctaccacctgctgaagcacgtagtgtgtctggagcccgatgacgtggccaagcttcatgcccagttggccctagaagagctggatgacatcatgaaaaacttcctgttccctccacagaagctggagaagaagatcatggtcctgccgtagacctggctccaaggacgtggaggaggcaggcagggccaggcacccagagccgtgcccaggtcttccagcaggtggccctgctgcctcttgagtgctggcagcatggctgaccctcggggtggttttatggtgcaggtcacttgggtcttcagggtcccttccgagggcatgtgttcagcactcccgcgttcagcctgaggggtgtacagttaagagaagacagttacagatctcattaatctacatttttcactgtcctctagcattgaaagaaggatgtctacctggtgaaagtatattttaacatgactgatggaatttcactaattgcccactctcttggaacttgaggagaagcggttggccacccatatgtcacctagctctatattctttcaggctgagattcttcttcaggaaaatgaggagcagaactggccacccttggctgctcaagaggcatttcagagtaggagatgcagttggaggtggggaggggaaggaaatagttatcaaataatgcaaaatggaataaagttatcttggatggaaagaacagggctaaatctggtcctctggtgtcgagatggaaaactgtggagttgaagaggctctgatgcccagaaaggacaatcaagctggttgactcttccagagaagaagggtaagccctgtatttatcctcccaggccattcttcttcactcctgctgctgtttgcagagagttgccctgattatcaggagaaaagaaccacgagcatccagagagtttacatcctgccttctgtcctctgctccttcagaaagatgaatgcctagacaatgggttcacactgaatgcaggctggaaagaatgcatgctggtggcctaatgccagggctgttgaaacaatttcagatatagcactgtggtctccactttatttctttatatgttttggccgctgcattttgattgcagctaaaagagataacagaaaggagatactggctggctgcttcatattagccctctctgttgtcaacaccttgatgaggccaacccagagatgcttgatcagtcctcagctttgcagggctaggtacagaattttatcacaggattttatcacgctctctggggtgactagatccacaggaaccaaaacgcagtttccaaaagctcgagtgactgaaggatctatacacaaacatggctatttgctagttaacaacaggatatttctctctggccagatcacagacatggttctgagtcagatcttccttggtggcatccctttaaagaggccatcttatgaacaggatcacaagtgagcttagtgagcagagagttagaacaaatctagctaggtgtgtttaaggaatatttccattcagctagtgtagctggattaatttctattctccaaatcaaggatgtctagaaaatgggcattgtggctttcaaatctaagaagaatctcctttgggccagctggatgtacaataaaaatgcttgtttcttggccttccttt

SEQ ID NO: 22536 - DNA, 6373 bp, Homo Sapiens
ggcccctgactgcccacagcccacatgcccaccctgaaaccaagaaaaccaggccagatgttcttcccttccggcgacaggattcagcgggacccgtcctggatggagctcggtcccggaggtcctcctcgtcatccacaactcccacgtcagccaactctttgtacaggtttttactggatgatcaggaatgtgccatccatgccgacaacgtcaatcgtcatgaaaacagaaggtatattcccttcctgccaggaactggacgggatattgatacaggatcaattcctggtgtggatcagttaattgaaaaatttgatcaaaaacctgggcttcagagaagaggaaggtctgggaagcgaaacagaattaatccagatgacaggaaaagatccagaagcgtggatagcgcctttccttttggcctccaagggaactcggagtacctgattgaattcagtaggaacttgggcaagtcaagcgaacacctcctccggccttcccaggtgtgcccgcagcggccactgtctcaggagcgccgtgggaaacagagcgtgggccgcacctttgcaaagctgcagggagcagcgcacggggcttcatgtgcccactccaggcctccccagccgaacatagatgggaaagttctggaaaccgaaggtagtcaggaaagtacagtgatccgtgcgccctcccttggtgcacagagtaaaaaggaggaggaggtgaaaacagccaccgctacgctgatgttacagaaccgggcagcagcaacttcgcctgattctggtgccaagaaaatttccgtgaagacatttccttcggcctcaaatactcaggccacaccggatctcttaaagggccagcaagagctcactcagcaaaccaatgaggagacagctaagcagattctctacaattacctcaaagaaggaagcactgataatgacgatgctactaaaaggaaagtcaacttggtctttgagaaaatccagaccttaaagtctcgagcagctgggagcgcccaaggaaataaccaagcttgtaattccacatctgaagtcaaagatctattggaacagaaaagcaagttgaccatagaagtggctgaacttcagagacagcttcaactggaagtcaagaatcaacagaacattaaagaagagagagagaggatgagagcaaacctagaagagctccgaagccaacacaacgaaaaggtggaggagaactccacattgcagcaacgactggaagaaagtgaaggggagctccggaagaatctggaggagctattccaggtgaagatggaacgggagcagcatcagactgagatcagggatctccaggaccagctctcagaaatgcacgatgaactggacagtgcaaagcgatcggaggacagggagaagggagctctgattgaggagctcttacaggcaaaacaggatcttcaagatctgctgattgccaaagaggagcaagaagacctcttgagaaagcgagagcgtgaactcaccgccctgaagggagccctgaaagaagaggtttccagccatgatcaggagatggacaagctgaaggagcaatatgatgctgagttgcaggccctgagggagagtgtggaagaagcaaccaagaatgtcgaggtcttggcgagcaggagcaacacttcagagcaagaccaggcggggactgaaatgcgcgtgaagcttctgcaggaggagaatgagaagctgcagggaagaagcgaagagctggagcggagagttgctcagcttcaaaggcagatcgaggacctgaaaggcgatgaagccaaggcgaaggaaacgctgaagaagtacgagggagaaatacgacagttagaggaggcccttgtgcacgccagaaaggaagaaaaagaagctgtgtcagccagaagggccctggagaatgaactggaggctgctcagggaaatctgagtcagactacccaggagcagaagcagttgtctgagaagctcaaagaggagagtgagcagaaggagcagctaagaaggttgaagaacgagatggagaatgagcggtggcacctgggcaaaaccattgagaaactgcagaaggagatggcagacattgttgaggcctcccgtacctcaaccctggagctccagaaccagctggatgagtataaggagaaaaaccgcagggagctcgcagaaatgcaaagacagttgaaggagaaaacgctggaggcagaaaagtcccgactgacagccatgaaaatgcaggatgagatgcgtctgatggaggaagagttacgggactaccagagagctcaggatgaagcactcacaaaaaggcagcttctggagcagacgctgaaggacctggagtatgagctggaagccaagagtcacctcaaagatgaccgcagcaggctggtcaagcagatggaggacaaggtgtctcaactggagatggaactggaagaagagagaaacaactcagatttgctgtctgagaggatcagtaggagcagggaacagatggagcaggtgaggaatgagctacttcaggagagagctgcgagacaagacttggagtgcgacaagatttccctggagaggcagaacaaggacttaaagagccggattatccacctggaaggttcctacaggtccagcaaagaggggctggttgtgcagatggaggccaggatcgcggagctggaggaccgcctggagagtgaggagagggatcgggccaatcttcagctcagcaaccggcggctggagcggaaagtgaaggagctggtgatgcaggtggatgatgagcacctgtcattgactgatcagaaggaccagctgagcttgcgtttgaaagccatgaagcggcaggtggaggaggctgaggaggaaatcgacagactggaaagttctaaaaagaagctgcagagggagctggaggagcagatggacatgaatgagcatctgcaggggcagctcaactccatgaagaaggacttaagactgaagaagctgccgagtaaagtgctggatgacatggatgacgacgatgacctcagcacggatgggggaagcctctatgaggcgcctgtgagctacacattctccaaggacagcaccgtcgccagccagatctgagtgctctcccgggctgtggaagtacctgtcattcctgcaggagctgcagccacccaaagtgggaggcagggaggggagcatctgtctgccactgagacctatcacagcctctttgcacagcatgccagctcctcagtgttacgttcctcgccagggtctctcagtgggtcttcgacagagagcttttgcagtttaaaatgttgggatgcctgaggaccaggagccaccacccactggggtgttgtgagagatacactttggtaggctgaggcccctgttccacagccactatttgcattgctgtccctgccccctcatcactccccctgccaagacaaagggtccagaaggctaggacttacttaatagcactgtgcagggaggaaaccatgtatagcttgtacatattttaaaccagaccttctcacgaactgctgccgttgggtttggaatgtgatggaggcttggtagggtggctggtttgtaaagttcatgcatctatattgagtattcttttttttttttttttgagatggagtttcattcttgttgccgaggctggagtgcaatggcgcaaccttggctcactgcaacctctgcctccctggttcaagtgattctcctgcctcatcctcccaagcagctgagattacagatgaccaccaccactcctggctaattttttgtatttagtagagacggggtttcaccatgttggtcaggctggtcttgaactcctgacctcaggtgatccacctgcctcagcctcccaaagtgctgagattacaggcatgagccaccacgcccagccattgagtattcttttttaaaatatgaagctattagattttaagtgttgaggagcagaggtgagagagagagagagagagagaaagtcaaataaagtcaaagaccagtttggaaaccaaagttggaaaagaagaattgtagtggtcatggacagctaagactgagcatagcagttcacatggtctgggtaaacaagtcactggcacaggggaaagccagaaggttgcttgtgtctgtgactgcagctatggccttgtttgcttagtttatctagaattctgttataatttctgaactgttctgagacctgttcccagtcactgattgcaatttcttttacacaggttgggtagggagagttgtaggtaaggccttaaacaaatgaggccgtttctggaaggatagggctgtgtggtcatgtcccacagcaagcttttgggatcgggggaataagagggtatgggggaaaggttcatagacttaggtgtgagaatgaggtgggaggtgtctggtaaggtcatgggggaagggagatgagagaggagataggcagatgtgggtatggggcccagtgtgagaaggaagacagagaagttcttgaaagctgggggatgtgtgggcaagaggtggattgagcaggatctcagggttatgtcgaggaagggaagaaagaaacagaagtcaggcagaggcgtgtctgtgcaaactggaggactccttccaacttcctggaacaaagcgacatcgccagcagcaggctggcagggagtggttgaggtctgggggccaggccacatggctggagaggaatttcagggagcatagcatcgggaggatgctacatatccagggactccctcctggccttcctgtgtcacttcacaatgtgacagtccccaggcatgcccacaggccaggcccagtcacagctgggcttccacaggtcagaatatgggacaggacatggtcagggagaggaccctgtgagttggtgacatatatgtggcagagatggtagtgttcagctgcttcagcagtgtccccaaccatcccaatagggtgggggcctgtgggccagaggactccatgacagttgccatggagtcccacctgcgccaggtcagagcccacccggcaggtttcagagtggtcagcccagtttaagggtgggagtctggagccagacagccaagccccttccacatctacagggtcactgtcatcctcaccacagccaggggtgattctcacctctgcctgcttatgtggggtgtggccgattcctccctttagtcattcattcatttagcaaatatttattgggcatcggtgatgtgtcaggcacagtccttggcacacagaatacagcagtgaattaaacaggcaaaaattcctcccctcctggagctcagtgtcaggaaagggggtgataaatgacaatcaaatcgacatggaggttgagcacctctgtactcagccctctgtctgtccttctgaggacgcaacaagcctggttccctagagctcactttgaccctcaatatgttcataatttccctgctgcttctcccatcgttagacatctgccagtaagcctgctgagagaagcctcagcccactcatacctagagacgctgctggggaaggtcagcacacccaagaactttgggagtgtgtgtctgttttggtttgtgagaaagtagctgcccctcattctggccagttctttccagtagccatggggctggctacaagaagcaaaactgcccatgcaaggagaacacaggtcacttttcaaaacacttgcatcattaccccaaaaataggctgttatgcgttttgacaattgcgctatcctacactctgagggagttggcaacgcatgctgtatagtggagtgggaagagttgagactgaaagttaagagaagggttttcaagtcccagctcatctcaccccagtgaccttgacagtgtgctcactctcagagccatggattacctggaacaaagtgcagattagggcccacggtcctttccaggtagaacatgctatcgttctttaattttattatatatacatacttttcttctgttttttgctttaagaactaaccccgatcaagagtattttctttagctagcttaaaaagaaaacatatattttatgtaaaaacacatacatggccaaatgcaatactgaagagacaatcatcctgtatcttttatggtttttcctgcttctgagtgtcgttctacaatgcccgttgacttattccattgcgtctctgctttagggtatggtttggtcgctttggttgtcatgagaaagagacattctccttgcagctacctccatgtgagtgaattcctggataaagcaagatttcctttcaataaacgctgtcacccaatggg

SEQ ID NO: 22537 - DNA, 3354 bp, Homo Sapiens
gcggcggcctgaactcacctaacaccgcagcagcaaccgggcccggccaggttcggcgttccgtgagtgaacgatttagaaatctggactggccagtgacctctgggcttgccattccagcctggtataacctctggctccatgggcagctactggctcctacagaccggatgaagcagactggagacacaagtggagaaaacctccagctggcaaatcctcagagtgtaggcctctggctgccagtcctgcccagcctgcctcatggagaggatgaattggctgagcagactggcctcccggggccctgggcaccgtatacctcaaggggccaatctccaaaccccagtcatggctgatcccgagacctgcctcatggtcttcaagaatcactggtcccaggtggtgcgaatcctggagcggcaaggccctcgggcagctcctgggggtgcagacgatctcagtgctgtgcgcaaccacacttaccagatgttgacactgctggcagaggaccgtgcagttccctcggcccccacaggccctgggcccctgctggagtttgctctgcacgaggatctgctgacccgtgtgttgacatggcagctgcaatgggatgagcttggggatggggtcgaggaacggcgggctgagcaactgaaactatttgaaatgctagtgagcgaagctcgccagccactgttgcggcatggtccagttcgtgaggctctgctcaccctgctggatgcctgtggccgccctgtgcccagtagcccagcactggatgaaggcttggtgctacttctcagccagctgtgtgtttgtgtggcccaggagccttcattgctcgagttcttcctgcagccacctcctgagcctggagccgctccccgtcttcttctcttttctcgccttgtcccttttgtgcatcgagagggcaccctgggccagcaggcccgtgatgccctacttcttctcatggctttgtcagctgggagccccactgtgggccgctacatcgcggatcactcttacttctgcccggtgctggccacagggctcagtgccctgtactcatcactgcctcgaaagattgaggttccaggggatgattggcactgtctgcgacgggaagactggctgggagtgccagcccttgcactcttcatgagttccctggagttctgcaatgcagtaattcaggtggctcaccccctggtgcagaagcagttggttgattatatccataatgggttcctggtgcctgtcatgggtcctgccttgcacaagacctctgtggaggagatgatcgccagtaccgcctatctggaacttttcctacggagtatctcagagcctgctttgctccgtaccttcctgcgattcctgttgttgcaccggcatgacacccacaccatcctcgacaccctcgttgctcgtattggcagtaactcccggctctgcatggtctctctgagtctcttcaggaccctcctgaacctcagctgtgaggatgtcctgctgcagctggttctcaggtatcttgttccatgtaaccacgttatgctgagccagaagccggctgttcgtgatgtggacctatatggacgagcagctgacaagtttctctccctaatcccacgctgttgtcggcaccacgcccccagcccacctcgtccagagcatgcctcatgggcacgaggtcctggaagcccaagtgtggactcctcttctgtgatgacagtaccccggccctccacaccatctcgtctggctctcttcctgcggcagcagagcctgggtggctctgagtctccaggcccagccccttgctcaccagggctttctgcatcccccgcctccagccctggccgacggcctacccctgcagaggagcctggagagctggaagacaattacctggagtatctgcgtgaggcacgtcgtggtgtggaccgctgtgtccgagcctgccgtacctggtctgccccctatgatggcgagcggccctctcctgagcccagtccttttggctcccggactaagaaacgcagcctactgcctgaggaggacaggaacaacgtgggggaaggggaggaggaagagctggggaggagggggcgggctgggggtgcaggggagggccctggtcacctgccccctccccagctcaatggagtgccaggatcatggcctgagggggccaagaaggttcgtctggtgccaaaggagggagctggggaactgctagagggcatctccgagggcatggcaggactagagggctttgggcaggagctccgggagctagaggtggcattgagcaatgggggaactggctcagagtcccccttagaacctccactgccccttgaggaggaggaggcctacgagagcttcacctgtccccctgagccccctggccccttcctcagcagccctttgcggactctcaaccagctgccaagccagcccttcactggccccttcatggctgtgctctttgccaaactcgagaacatgctgcagaactccgtctatgtcaacttcctgctgacggggctggtggcccagctggcctgtcacccccagcccctgctccgctctttcctgctcaacaccaacatggtcttccagcccagtgtcaagtccctgctgcaggtgctgggctctgtgaagaataagattgagaactttgcggcttcccaggaggacttcccagcactgctgtccaaagccaagaagtacctcattgcccgtggcaagttggactgggctgagggccctgcagcaggacctgccccacgccgttctgatcccctagtgaagagccggaggccatccttgggggagttactcctgcggcatgcacacagtccaaccagggcccggcaggcggcacaattggtccttcagcctgggcgagacggagcaggacttggcctaagtgggggctcccctggggcttcaactccagttctactcacccggggcggggcccctgaacgccaaggtgaggctcttcgagtcaagaatgctgtctactgtgcagtcattttccctgaatttctcaaggagttggctgccatctcccaggctcatgccgtcacctcgcctttcttgttggagacttcagaggaaggatctggccctctcatctcaggctgtgggcccctcaatccttaactttcttccatggacaatcagggccatgggtggcccgggctggggctagggcacaggctcctttttatgtttggaggcagtggcaaaaggactttttaatttatttcagatgaatgttttatggagaacttgttgcaatatgtataaaagggaaatctctattctgtgctc

SEQ ID NO: 22538 - DNA, 7484 bp, Homo Sapiens
tgctcacttctgacagccagacaagggctgtgctcaggggcagctcggctgggcacacagtaggtgctttagcggacagcactgaggcccccagcaagaagcccatgagctcctccccctcccgcagtgccgccgacatctacatccgggagtatttccacagccacgtcagcggcggccaccccgaggccactcctctccgtgtgatgtacacggaccggccgctgagccagacggacccagtcacgctgcagtactgttgcctgaccgacgaccgccaggctttccgcccgcccacacgggcagagctggcgcggcaccgcgtggtggtcaccaccacctcccaggcccgtgagctcagggtgccggtcggcttcttctcccacattctcatcgatgaggcggcccagatgctggagtgcgaggccctcaccccgctggcctacgcctcgcacggcacccgcctcgtgctggcgggcgaccacatgcaggtcacaccccggctgttcagtgtggccagggcccgggcggccgagcacacgctgctgcaccgcctcttcctgtgctaccagcaggagactcacgaggtggcgcggcagagccgcctggtcttccacgagaactaccgctgcacggacgccattgtcagcttcatctcgcggcacttctacgtggccaagggcaaccccatccacgccaggggcaaggttccgccccacccccggcactacccgctcatgttctgccacgtggcgggcaacccagaccgggacatgtccatggcgtcctggctgaatctggctgagattgcgcaggtcgtcgagaaggtgcaggaggcctacaacacctggcccagctgctggggcggccgtgagcagaggtgcatctgtgtcgtttcccacggtgcccaggtcagtgcactgaggcaggagctgaggaggcgggacctaggccaggtgtctgtcggcagttttgagatcctgccagggcggcagttccgggtcgtggtgctcagcactgtgcacacctgccagagcctgctcagccctggggcactggcccctgagttcttcaccgacgcccgcgtgctcaacaccgtcctgacccgcgcccagtcccagctggtggtagtgggggacgccgtggccctctgctccttcggggcctgcggcaagctctgggagagcttcatccgtgagtgcgtggagcggcacagtgtctgccccgagggcctgtccatggagcaggtcgagcagggtgtggcgcagagacggcgctggcctccccgaggcacacaggctggggcagcggggaactgggaggctgccccagagccagtaggggacctggccgaggagcaggcggctgtggtgacggccatggtgaaggcagagccgggagatgaggctctgagcccagcatcccgtgacatcacggcaaccacagcgcagacggaggctgcggcagcaccagcaggagacgcagtgaaggaagacgtggtgcccggggcctgtgcggcaggagcggctgctgcagcgggcgtggagtccacggaggctgaggatgcagaggctgacttctggccgtgggacggggagctcaacgctgacgacgccatcctacgggagcttctggacgagagccagaaggtgatggtgaccgtcggggaggacgggctgctggacaccgtcgccaggcccgagtccctgcagcaggcccggctgtacgagaacctgcccccggctgcgctacggaagctgctgcgcgcggagcccgagcggtaccgccactgctctttcgtgccagagaccttcgagcgggcgtcagccatcccgctggacgatgcctcctcgggccccatccaggtcaggggccgcctggactgtgggatggccttcgccggggatgaggtgctggtgcagctcctttcgggagacaaggcgcccgaggggcggcttcggggccgcgtgctgggcgtgctgaagaggaagaggcacgagctggcgtttgtgtgccgcatggacacgtgggacccgcgcatcatggtccccatcaatggctccgtgaccaagatcttcgtggccgagctgaaggacccatcgcaggtccccatctacagcctccggaagggccggctgcagcgtgtggggcttgagaggctcaccgccgaggcccggcacagccggctcttctgggtccaaattgtcctgtggcggcaaggcttctactacccgctgggcatcgtccgggaggtgctgcctgaggccagcacctgggagcagggcctccgcatcctcggcctggagtacagcttgagggtgcccccgtcggaccaggccaccatcaccaaggtgctgcagaaataccacacggagcttggccgggttgccggccgccgagaggactgccgcgccttcttgaccttcactgtggacccccagggcgcctgcaacctcgatgatgccctcagtgtccgagacctgggtcccaggtgcgaggtggctgtgcacatcactgatgtggccagcttcgtgcccagggacggggtgctggacgtggaggcgcgaaggcagggcgctgcgttctatgcccccggcagggagccagtgcccatgctgccggccagcctctgccaggacgtcctcagcctcctgcctggccgggaccgcctggccatctccctgttcctcaccatggagaaggccagtggccagctgaagagcctgcgctttgcaccctccgtggtccagtctgaccgccagctgtcctacgaggaggcggaggaggtgatcaggcagcacccgggtgccggccgtgagctgccggcccgcctggactccgtggacgcctgcgtcgtggccgcgtgctacttctctcggctgctgcgccggcaccgcctgcggtccgactgcttctatgagcagccggacgaggacggcaccctgggcttccgcgcggcccacatcatggtgaaggagtacatgattcagtttaataggctcgtggctgagttcctggtgggcagcgagtgcacgcggacggtcacgcctctgcggtggcagccagcaccccgcagccagcagctcaaggccctgtgtgagaagcatggggaccgggtgcccctgtcactgcacctcggccaccacctgcacggcggcgggggcagtccccccgacacgcggctgcacctcctggcctccctctggaagcaggtccagtttgctgcccgcacccaggactacgaacagatggtggacttggtcaccacggacgacatgcacccattcctggctcctgcaggccgcgacctccgcaaggccctggagcgctcggcgttcggccgctgcgcccggggccaccagcagcagggcggccactactcgctgcaggtggactggtacacgtgggccacctcgcccatccgcaggtacctggacgtggtgttgcagcggcagatcctgctggcgctgggccatgggggctctgcctactctgccagggacatcgatgggctctgccaggccttcagcctccagcacgcacttgcccagagctatcagcggcgggcgcgcagcctgcacctggccgtgcagctcaaggcccagcctctggacaagctgggcttcgtggtggacgtggaggcgggctcccgctgcttccggctgctcttccccagcaaccgggagacgctgcctgacccctgccccgtcccctacggctccctgcagctggccgagcacccccacgccctggcaggccggccgggcctgcggctcctgtggcggcgccgtgtctactcagcgcagggatccagcccgcccctgccactgcctggcactgtgccggacccacacaccctggccgtggagacggccctgtggaagcagctgctggagctggtggagctgcagcgctggccggaggcggctgctctcatccaggagaagggcgaggcgtcccagcggcgggagctggtgcaggtgcagcggagccactgtggccatttcctggaggtggcccgggagctgggcagtggggacaccctgcaggtgcagctcggcaccagcctgcagcacggcttcctggtaccgagccctcagctctggacggtggcaccgggcttcagcctctgcctggagcacgtggagcggcccggagactgcttctcaggccgtgtgtaccgggccccgagggaccggtaccgcgacgtggatgagtacgcctgcgtgtgggaaccattctgcgccctggagtcggccaccggcgcggttgccgagaatgactccgtcacacttcagcacctgagtgtctcctgggaggcgtcacggacgccgcaggggcagctgcagggcgccttccgcctggaggccgccttcctcgaggagaactgtgccgacatcaacttcagctgctgctacctctgcatccggctcgaggggctgctggctcccacggccagcccacgccccgggcccagcagcctcggccctggcctgaatgttgaccccggcacgtatacctgggtggcccacgggcagacggaggactgggaccaggagcgccgggcagaccggcaggaggctcccagacgggtgcacctcttcgtccaccacatgggcatggagaaggttccggaagaggtgctgaggccgggcaccctgttcaccgttgagctgctgcccaagcagcttcctgatctccgcaaggaggaagccgtgcgtggactagaggaggcgtccccgctggtcaccagcatcgcactgggccggcctgtcccgcagcccctctgcagagtgatccccagcaggttcctggagcggcagacctacaacatccccggaggccgccacaagctgaaccccagccagaacgtggcggtcagggaggctctggagaagcctttcacggtcattcagggcccaccaggtacagggaagacgatcgtgggcctccacatcgtattctggtttcataaatcaaaccaggagcaggtgcagcccggaggccccccccgtggggagaagcggctggggggtccctgcatcttgtactgcggcccctccaacaagtcggtggatgtcctggcaggactgctcctgagaaggatggagctgaagcccctccgtgtgtacagtgagcaggctgaggccagcgagttcccagtgccgcgtgtgggcagcaggaagctgctcaggaagagcccccgggaggggaggccgaaccagagcctcaggagcatcaccctgcaccaccggatccggcaggcccccaacccttactcgtcggaaatcaaggcctttgacacccggctgcagagaggggagctcttctccagggaggacctggtctggtacaagaaggtcttgtgggaggctcggaagttcgagctggaccggcatgaggtcatcctctgcacctgctcctgtgcagcctctgccagcctcaaaatcctggacgtgaggcagatccttgttgacgaggcaggcatggccacggaacctgaaaccctcatccccctggtgcagttcccacaggccgagaaggtggttcttctcggagaccacaagcagctgcggcctgtggtcaagaatgagcggctgcaaaacctgggtctggaccggtctctgttcgagcggtaccacgaggacgcacatatgctggacactcagtaccgcatgcatgagggcatctgtgccttcccctctgtggcgttctacaagagcaagctgaagacgtggcagggcctgaggaggccgcccagtgtcctgggccacgctggcaaggagagctgtcctgtcatctttggccacgtgcagggccacgagcggagcctgctggtgtccacggacgaagggaatgagaactccaaggccaacctggaggaggtggctgaggtggtccgtatcaccaagcagctgaccctggggaggaccgtagagccccaggacatcgccgtcctcacgccctacaacgcgcaggcctctgagatcagcaaggcccttcggcgagagggcatcgccggggtggccgtgtcctccatcaccaagagccaggggagcgagtggcgctatgtgctggtgagcaccgtccgcacctgtgccaagagcgacctggaccagcggcccaccaagagctggctcaagaagtttctgggcttcgttgtggaccccaaccaagtgaacgtggctgtcacgcgggcccaggaggggctctgcctgatcggagaccacctccttctgcgctgctgccccctctggcgtagcctcctggacttctgcgaggctcagcagaccctcgtgcctgccggccaggtgcgcgtctgcaggaggccaactatgccttcctgaagagccctctccacctgcaaggtgccaggactgggagggaaagtccagggcccccccaccctccccaccaccctccgccatcagcctgcctgggccagcctgcctcctggcctcaggatctccctggggcaggaagtgggtggacttggaggaggaacggcaagggccggtccccacactcttgcttctcctgggcatctggggacaggaacacctctcagggtggccaagaggggcttccttgggaccagtgtaaggaagttctgctgtccctgggaagtctcagaaccaggaaggaaaccctgtggaggctgccctttgacctttggacgccacctgtaatcactctggatggtgtctgtggagttcaggtttattttctatttaaatgaactaaaagccagcatcctgccgggcgtggtggctcacgcccataatccagcactttgggaagccgaggcgggcagatcacctgaggtcaggagttcgagaccatcctggccaacatggtgaaaccccgtctccactaaaaatacaaaattagctgggcgtggtggcgggcgcctgtaatcccagctacttgggaggctgaggcaggagaatcgcttgactccaggaggcgcaggctgcagtgagctctgatggtaccactgcactccagcctgggtgacagagcgagaccctgtcttaaaaaaaaaaaaacaaaacaaaaccagcatctgttactggaacagagacctcagcccaagctcaggacaaggaggcctccctgggagagggggcctttctcccaccatcaccgcctgtgtccttcaggggctgctggagggcagcccaaagccaggggcccaccccgccccaccccaccccaccccaccctctgaaatgtgaaaagcctgcactcttcctgtgggctgcgcagtgggctcgggggttggggggtgccggggcgatgcttccaccctggactgagtgttcggggcagcctgctcggctgtatgtttctcgcacgctcacccgcttcagtgcggctctgtccctgctgccgcctccagtcctgagggaggggcttgccccaccttctacattccaatttttatatctttgaattatgtgattagatattaatttaatgat

SEQ ID NO: 22539 - DNA, 1886 bp, Homo Sapiens
gttagaggcggcttgtgtccacgggacgcgggcggatcttctccggccatgaggaagccagccgctggcttccttccctcactcctgaaggtgctgctcctgcctctggcacctgccgcagcccaggattcgactcaggcccccactccaggcagccctctctctcctaccgaatacgaacgcttcttcgcactgctgactccaacctggaaggcagagactacctgccgtctccgtgcaacccacggctgccggaatcccacactcgtccagctggaccaatatgaaaaccacggcttagtgcccgatggtgctgtctgctccaacctcccttatgcctcctggtttgagtctttctgccagttcactcactaccgttgctccaaccacgtctactatgccaagagagtcctgtgttcccagccagtctctattctctcacctaacactctcaaggagatagaagcttcagctgaagtctcacccaccacgatgacctcccccatctcaccccacttcacagtgacagaacgccagaccttccagccctggcctgagaggctcagcaacaacgtggaagagctcctacaatcctccttgtccctgggaggccaggagcaagcgccagagcacaagcaggagcaaggagtggagcacaggcaggagccgacacaagaacacaagcaggaagaggggcagaaacaggaagagcaagaagaggaacaggaagaggagggaaagcaggaagaaggacaggggactaaggagggacgggaggctgtgtctcagctgcagacagactcagagcccaagtttcactctgaatctctatcttctaacccttcctcttttgctccccgggtacgagaagtagagtctactcctatgataatggagaacatccaggagctcattcgatcagcccaggaaatagatgaaatgaatgaaatatatgatgagaactcctactggagaaaccaaaaccctggcagcttcctgcagctgccccacacagaggccttgctggtgctgtgctattcgatcgtggagaatacctgcatcataacccccacagccaaggcctggaagtacatggaggaggagatccttggtttcgggaagtcggtctgtgacagccttgggcggcgacacatgtctacctgtgccctctgtgacttctgctccttgaagctggagcagtgccactcagaggccagcctgcagcggcaacaatgcgacacctcccacaagactccctttgtcagccccttgcttgcctcccagagcctgtccatcggcaaccaggtagggtccccagaatcaggccgcttttacgggctggatttgtacggtgggctccacatggacttctggtgtgcccggcttgccacgaaaggctgtgaagatgtccgagtctctgggtggctccagactgagttccttagcttccaggatggggatttccctaccaagatttgtgacacagactatatccagtacccaaactactgttccttcaaaagccagcagtgtctgatgagaaaccgcaatcggaaggtgtcccgcatgagatgtctgcagaatgagacttacagtgcgctgagccctggcaaaagtgaggacgttgtgcttcgatggagccaggagttcagcaccttgactctaggccagttcggatgagctggcgtctattctgcccacaccccagcccaacctgcccacgttctctattgttttgagaccccattgctttcaggctgccccttctgggtctgttactcggcccctactcacatttccttgggttggagcaacagtcccagagagggccacggtgggagctgcgccctccttaaaagatgactttacataaaatgttgatcttc

SEQ ID NO: 22540 - DNA, 2603 bp, Homo Sapiens
ctccctgtttctgtcttgaacctgattctttcttcttatctccttcctgtgtccacctcaagactcccaccactacccaggaccaactcctgctcctgaatcttctgatgggccccacaaggtgacagtgctggctacaatgctatccagccggtggtggccaagttcctgggggatcctagggctgggcccccgaagccctcctcggggatcccagctctgtgccctctatgcctttacttatactggggcagatggccagcaggtgtctctggctgaaggggataggttcctactgcttcgaaagaccaactccgactggtggttggcaagacgcctagaagctccctccacctctcgacccatcttcgtcccagcagcctatatgatagaggaatccatcccttcccagagtccaactaccgtcatccccggccaattgctctggactcctgggccgaagttgtttcatggttccctggaggagttgtctcaggccctcccaagcagggctcaggctagctcggagcagcctcctccacttccccgcaaaatgtgtaggagcgtcagcactgacaatctgagccccagccttctgaagcctttccaggaaggaccaagcggaagatccctctcccaggaagacttgccgtcagaagccagtgccagcacagcaggcccccagcccctcatgtcagagccccctgtgtactgtaacctggtggaccttcgccgctgtcctcggtccccacccccaggccctgcatgccccctgctgcagaggctggatgcctgggagcagcacctggaccccaactctggacgctgcttctacataaattcactgactggctgcaagtcctggaagcccccgcgccgcagtcgcagcgagacgaaccctggctccatggaggggacacagaccctgaagaggaacaatgatgtcctgcaacctcaggcaaagggcttcagatctgacacagggaccccagaaccgcttgacccacagggttcactcagcctcagccaacgcacctcgcagcttgaccctccagccttgcaggcccctcgacctctgccgcagctcctggacgacccccatgaggtggaaaagtcgggtctgctcaacatgaccaagattgcccaaggggggcgcaagctcaggaagaactggggcccgtcttgggtggtgttaacgggtaacagcctggtgttctaccgagagccaccgccgacagcgccctcctcaggctggggaccagcgggtagccggcccgaaagtagcgtggacctgcgcggggcggccctggcgcacggccgccacctgtccagccgccgcaacgtcctgcacatccgcacgatccctggccacgagttcctgctgcagtcggaccacgagacagagctgcgagcctggcaccgcgcgctgcggactgtcatcgagcggctggatcgggagaaccccctggagctgcgtctgtcgggctctggacccgcggagctgagcgccggggaggacgaagaagaggagtcggagctggtgtccaagccgctgctgcgcctcagcagccgccggagctccattcgggggcccgaaggcaccgagcagaaccgcgtgcgcaacaaactaaagcggctcatcgcgaagagaccgcccttacaaagcctgcaggagcggggtctgctccgagaccaggtgttcggctgccagttggaatcactctgccagcgggaaggagacacggtgcccagctttttgcggctctgcattgctgctgtggataaaagaggtctagatgtggatggcatttatcgggtgagcgggaacttggcagtggtccagaagcttcgctttctggtggacagagagcgtgcggtcacctccgatgggaggtatgtgttcccagaacagccaggacaagaaggtcggttagatttggacagtactgagtgggatgacattcatgtggtcaccggagccctgaagctttttctccgggagctgccccagcctctggtgccaccactgctgctgccccatttccgtgctgcccttgcactctccgaatcagagcagtgcctctctcagatacaagaattaataggctcaatgccaaagcccaaccatgacactctacggtacctcctggagcatttatgcagggtgatagcacactcagataagaatcgcatgacaccccacaacctgggaattgtgtttggaccaaccctgtttcggccagagcaggagacatctgacccagcagcccatgctctctacccagggcagctggtccagctgatgctcaccaacttcaccagcctcttcccctgatgcagggaaggaagaagagaaaacatatttccggtcatctctggtggtgagaggctggtgttctgttttgaggatatccctttaaatctcccaaatgactgtctctatcttcatgagtgtgacttgaggtgttgggatgggtgagggagcttctctaaagaggaaagtgagtggattaacccctgcttctcttcttgttccctgttatcattcctccccaacataataatacataaagtggcatggtaaaaaaaaaaaaaaaaaaaaa

SEQ ID NO: 22541 - DNA, 3467 bp, Homo Sapiens
gtcgacccacgcgtccgctttaaagagggaaagagtgagattcagaaatcgccaggactggactttaagggacgtcctgtgtcagcacaagggactggcacacacagacacacgagaccgaggagaaactgcagacaaatggagatacaaagacttagaaggacagctcctttcacctcatcctacttgtccagaaggtaaaaagacacagccagaaagaaaaggcatcggctcagctctcagatcaggacaggctgtggatctgtggcggtactctgaaagctggagctgcagcacaccccttttgtattgctcaccctcggtaaagagagagagggctgggaggaaaagtagttcatctaggaaactgtcctgggaaccaaacttctgatttcttttgcaaccctctgcattccatctctatgagccaccattggattacacaatgacatggagaatgggaccccgtttcactatgctgttggccatgtggctagtgtgtggatcagaaccccacccccatgccactattagaggcagccacggaggacggaaagtgcctttggtttctccggacagcagtaggccagctcggtttctgaggcacactgggaggtctcgcggaattgagagatccactctggaggaaccaaaccttcagcctctccagagaaggaggagtgtgcccgtgttgagactagctcgcccaacagagccgccagcccgctcggacatcaatggggccgccgtgagacctgagcaaagaccagcagccaggggctctccgcgtgagatgatcagagatgaggggtcctcagctcggtcaagaatgttgcgtttcccttcggggtccagctctcccaacatccttgccagctttgcagggaagaacagagtatgggtcatctcagcccctcatgcctcggaaggctactaccgcctcatgatgagcctgctgaaggacgatgtgtactgtgagctggcggagaggcacatccaacagattgtgctcttccaccaggcaggtgaggaaggaggcaaggtgagaaggatcaccagcgagggccagatcctggagcagcccctggaccctagcctcatccctaagctgatgagcttcctgaagctggagaagggcaagtttggcatggtgctgctgaagaagacgctgcaggtggaggagcgctatccatatcccgttaggctggaagccatgtacgaggtcatcgaccaaggccccatccgtaggatcgagaagatcaggcagaagggctttgtccagaaatgtaaggcctctggtgtagagggccaggtggtggcggaggggaatgacggtggagggggagcaggaaggccaagcctgggcagcgagaagaagaaagaggacccaaggagagcacaagtcccaccaaccagagagagtcgggtgaaggtcctgagaaaactggccgccactgcaccagctttgccccaacctccctcaacccccagagccaccacccttcctcctgccccagccacaacagtgactcggtccacgtcccgggcggtaacagttgctgcaagacctatgaccaccactgcctttcccaccacgcagaggccctggaccccctcaccctcccacaggccccctacaaccactgaggtgatcactgccaggagaccctcagtttcagagaatctttaccctccatcccggaaggatcagcacagggagaggccacagacaaccaggaggcccagcaaggccaccagcttggagagcttcacaaatgcccctcccaccaccatctcagaacccagcacaagggctgctggcccaggccgtttccgggacaaccgcatggacaggcgggaacatggccaccgagacccaaatgtggtgccaggtcctcccaagccagcaaaggagaaacctcccaaaaagaaggcccaggacaaaattcttagtaatgagtatgaggagaagtatgacctcagccggcctactgcctctcagctggaggacgagctgcaggtggggaatgttccccttaaaaaagcaaaggagtctaaaaagcatgaaaagcttgagaaaccagagaaggagaagaagaaaaagatgaagaatgagaacgcagacaagttacttaagagtgaaaagcaaatgaagaagtctgagaaaaagagcaagcaagagaaagagaagagcaagaagaaaaaaggaggtaaaacagaacaggatggctatcagaaacccaccaacaaacacttcacgcagagtcccaagaagtcagtggccgacctgctggggtcctttgaaggcaaacgaagactccttctgatcactgctcccaaggctgagaacaatatgtatgtgcaacaacgtgatgaatatctggaaagtttctgcaagatggctaccagaaaaatctctgtgatcaccatcttcggccctgtcaacaacagcaccatgaaaatcgaccactttcagctagataatgagaagcccatgcgagtggtggatgatgaagacttggtagaccagcgtctcatcagcgagctgaggaaagagtacggaatgacctacaatgacttcttcatggtgctaacagatgtggatctgagagtcaagcaatactatgaggtaccaataacaatgaagtctgtgtttgatctgatcgatactttccagtcccgaatcaaagatatggagaagcagaagaaggagggcattgtttgcaaagaggacaaaaagcagtccctggagaacttcctatccaggttccggtggaggaggaggttgctggtgatctctgctcctaacgatgaagactgggcctattcacagcagctctctgccctcagtggtcaggcgtgcaattttggtctgcgccacataaccattctgaagcttttaggcgttggagaggaagttgggggagtgttagaactgttcccaattaatgggagctctgttgttgagcgagaagacgtaccagcccatttggtgaaagacattcgtaactattttcaagtgagcccggagtacttctccatgcttctagtcggaaaagacggaaatgtcaaatcctggtatccttccccaatgtggtccatggtgattgtgtacgatttaattgattcgatgcaacttcggagacaggaaatggcgattcagcagtcactggggatgcgctgcccagaagatgagtatgcaggctatggttaccatagttaccaccaaggataccaggatggttaccaggatgactaccgtcatcatgagagttatcaccatggatacccttactgagcagaaatatgtaaccttagactcagccagtttcctctgcagctgctaaaactacatgtggccagctccattcttccacactgcgtactacatttcctgcctttttctttcagtgtttttctaagactaaataaatagcaaactttcacctaaaaaaaaaaaaaaaaaa

SEQ ID NO: 22542 - DNA, 1316 bp, Homo Sapiens
ccttatacaggatgctgtgttctttgctcctttgtgaatgtctgttgctggtagctggttatgctcatgatgatgactggattgaccccacagacatgcttaactatgatgctgcttcaggaacaatgagaaaatctcaggcaaaatatggtatttcaggggaaaaggatgtcagtcctgacttgtcatgtgctgatgaaatatcagaatgttatcacaaacttgattctttaacttataagattgatgagtgtgaaaagaaaaagagggaagactatgaaagtcaaagcaatcctgtttttaggagatacttaaataagattttaattgaagctggaaagcttggacttctagcttttgcacagcatcaggctgaagtcgccaagatggagccattaaacaatgtgtgtgccaaaaagatggactggactggaagtatctgggaatggtttagaagttcatggacctataaggatgacccatgccaaaaatactatgagctcttactagtcaaccctatttggttggtcccaccaacaaaggcacttgcagttacattcaccacatttgtaacggagccattgaagcatattggaaaaggaactggggaatttattaaagcactcatgaaggaaattccagcgctgcttcatcttccagtgctgataattatggcattagccatcctgagtttctgctatggtgctggaaaatcagttcatgtgctgagacatataggcggtcctgagagcgaacctccccaggcacttcggccacgggatagaagacggcaggaggaaattgattatagacctgatggtggagcaggtgatgccgatttccattataggggccaaatgggccccactgagcaaggcccttatgccaaaacgtatgagggtagaagagagattttgagagagagagatgttgacttgagatttcagactggcaacaagagccctgaagtgctccgggcatttgatgtaccagacgcagaggcacgagagcatcccacggtggtacccagtcataaatcacctgttttggatacaaagcccaaggagacaggtggaatcctgggggaaggcacaccgaaagaaagcagtactgaaagcagccagtcggccaagcctgtctctggccaagacacatcagggaatacagaaggttcacccgcagcggaaaaggcccagctcaagtctgaagccgcaggcagcccagaccaaggcagcacatacagccccgcaagaggtgtggctggaccacgtggacaggatccggtcagcagcccctgtggctagaggaacaccagc

SEQ ID NO: 22543 - DNA, 7916 bp, Homo Sapiens
agcttgcctagagctcattccctacgccccgactctgtcctggacagcgtgcccaccagccatggcggggccccggggcctcctcccactctgcctcctggccttctgcctggcaggcttcagcttcgtcagggggcaggtgctgttcaaaggctgtgatgtgaaaaccacgtttgtcactcatgtaccctgcacctcgtgcgcggccatcaagaagcagacgtgtccctcaggctggctgcgggagctcccggatcagataacccaggactgccgctacgaagtacagctggggggctctatggtgtccatgagcggctgcagacggaagtgccggaagcaagtggtgcagaaggcctgctgccctggctactggggttcccggtgccatgaatgccctgggggcgctgagaccccatgcaatggccacgggacctgcttggatggcatggacaggaatgggacctgtgtgtgccaggaaaacttccgcggctcagcctgccaggagtgccaagaccccaaccggttcgggcctgactgccaatcggtgtgcagctgtgtgcacggagtgtgcaaccatgggccacgtggggatggaagctgcctgtgctttgctggatacactggcccccactgtgatcaagagctgcccgtctgccaggagctgcgctgtccccagaacacccagtgctccgcagaggctcccagctgcaggtgcctgcccggctacacacagcagggcagtgaatgccgagcccccaacccctgctggccatcaccctgctcactgctggcccagtgctcggtgagccccaaggggcaggctcagtgtcactgccctgagaactaccatggcgatgggatggtgtgtctgcccaaggacccatgcactgacaaccttggtggctgccccagcaactctactttgtgtgtgtaccagaagccgggccaggccttctgcacctgccggccaggcctggtcagcatcaacagcaacgcttctgcgggctgcttcgccttctgctcccccttctcctgcgaccggtctgccacttgccaggtgaccgctgatgggaagaccagctgtgtgtgcagggaaagcgaggtgggggatgggcgtgcctgctacggacacctgctccacgaggtgcagaaggccacgcagacaggccgggtgttcctgcagctgagggtcgccgtggccatgatggaccagggctgccgggaaatccttaccacagcgggccctttcaccgtgctggtgccatccgtctcctccttctcctccaggaccatgaatgcatcccttgcccagcagctctgtagacagcacatcatcgcagggcagcacatcctggaggacacaaggacccaacaaacacgaaggtggtggacgctggccgggcaggagatcaccgtcacctttaaccaattcacgaaatactcctacaagtacaaagaccagccccagcagacgttcaacatctacaaggccaacaacatagcagctaatggcgtcttccacgtggtcactggcctgcggtggcaggccccctctgggacccctggggatcccaagagaactatcggacagatcctcgcctctaccgaggccttcagccgctttgaaaccatcctggagaactgtgggctgccctccatcctggacggacctgggcccttcacagtctttgccccaagcaatgaggctgtggacagcttgcgtgacggccgcctgatctacctcttcacagcgggtctctctaaactgcaggagttggtgcggtaccacatctacaaccacggccagctgaccgttgagaagctcatctccaagggtcggatcctcaccatggcgaaccaggtcctggctgtgaacatttctgaggaggggcgcatcctgctgggacccgagggggtcccgctgcagagggtagacgtgatggccgccaatggcgtgatccacatgctggacggcatcctgctgcccccgaccatcctgcccatcctgcccaagcactgcagcgaggagcagcacaagattgtggcgggctcctgtgtggactgccaagccctgaacaccagcacgtgtccccccaacagtgtgaagctggacatcttccccaaggagtgtgtctacatccatgacccaacggggctcaatgtgctaaagaagggctgtgccagctactgcaaccaaaccatcatggaacaaggctgctgcaaaggttttttcgggcctgactgcacgcagtgtcctgggggcttctccaacccctgctatggcaaaggcaattgcagtgatgggatccagggcaatggggcctgcctctgcttcccagactacaagggcatcgcctgccacatctgctcgaacccaaacaagcatggagagcaatgccaggaagactgcggctgtgtccatggtctctgcgacaaccgcccaggcagtgggggggtgtgccagcagggcacgtgtgcccctggcttcagtggccggttctgcaacgagtccatgggggactgtgggcccacagggctggcccagcactgccacctgcatgcccgctgtgttagccaggagggtgttgccagatgtcgctgtcttgatggctttgagggtgatggcttctcctgcacacctagcaacccctgctcccacccggaccgtggaggctgctcagagaatgctgagtgtgtccctgggtccctgggcacccaccactgcacatgccacaaaggctggagtggggatggccgcgtctgtgtggctattgacgagtgtgagctggacgtgagaggtggctgccacaccgatgccctctgcagctatgtgggccccgggcagagccgatgcacctgcaagctgggctttgccggggatggctaccagtgcagccccatcgacccctgccgggcaggcaatggcggctgccacggcctggccacctgccgggcagtggggggaggtcagcgggtctgcacgtgcccccctggctttgggggtgatggcttcagctgttatggagacatcttccgggagctggaggcaaatgcccacttctccatcttctaccaatggcttaagagtgccggcatcacgcttcctgccgaccgccgagtcacagccctggtgccctccgaggctgcagtccgtcagctgagccccgaggaccgagctttctggctgcagccaaggacgctgccgaacctggtcagggcccattttctccagggtgccctcttcgaggaggagctggcccggctgggtgggcaggaagtggccaccctgaaccccaccacacgctgggagattcgcaacattagtgggagggtctgggtgcagaatgccagcgtggatgtggctgacctccttgccaccaacggtgtcctacacatcctcagccaggtcttactgcccccccgaggggatgtgcccggtgggcaggggttgctgcagcagctggacttggtgcctgccttcagcctcttccgggaattgctgcagcaccatgggttggtgccccagattgaggctgccactgcctacaccatctttgtgcccaccaaccgctccctggaggcccagggcaacagcagtcacctggacgcagacacagtgcggcaccatgtggtcctgggggaggccctctccatggaaaccctgcggaagggtggacaccgcaactccctcctgggccctgcccactggatcgtcttctacaaccacagtggccagcctgaggtgaaccatgtgccactggaaggccccatgctggaggcccctggccgctcgctgattggtctgtcgggggtcctgacggtgggctcaagtcgctgtctgcatagccacgctgaggccctgcgggagaaatgtgtaaactgcaccaggagattccgctgcactcagggcttccagctgcaggacacacccaggaagagctgtgtctaccgatctggcttctccttctcccggggctgctcttacacatgtgccaagaagatccaggtgccggactgctgccctggtttctttggcacgctgtgtgagccatgcccagggggtctagggggggtgtgctcaggccatgggcagtgccaggacaggttcctgggcagcggggagtgccactgccacgagggcttccatggaacggcctgtgaggtgtgtgagctgggccgctacgggcccaactgcaccggagtgtgtgactgtgcccatgggctgtgccaggaggggctgcaaggggacggaagctgtgtctgtaacgtgggctggcagggcctccgctgtgaccagaaaatcaccagccctcagtgccctaggaagtgcgaccccaatgccaactgcgtgcaggactcggccggagcctccacctgcgcctgtgctgcgggatactccggcaatggcatcttctgttcagaggtggacccctgcgcccacggccatgggggctgctcccctcatgccaactgtaccaaggtggcacctgggcagcggacatgcacctgccaggatggctacatgggcgacggggagctgtgccaggaaattaacagctgtctcatccaccacgggggctgccacattcacgccgagtgcatccccactggcccccagcaggtctcctgcagctgccgtgagggttacagcggggatggcatccggacctgcgagctcctggacccctgctctaagaacaatggaggatgcagcccatatgccacctgcaaaagcacaggggatggccagaggacatgtacctgcgacacagcccacaccgtgggggacggcctcacctgccgtgcccgagtcggcctggagctcctgagggataagcatgcctcattcttcagcctccgcctcctggaatataaggagctcaagggcgatgggcctttcaccatcttcgtgccgcacgcagatctaatgagcaacctgtcgcaggatgagctggcccggattcgtgcgcatcgccagctggtgtttcgctaccacgtggttggctgtcggcggctgcggagcgaggacctgctggagcaggggtacgccacggccctctcagggcacccactgcgcttcagcgagagggagggcagcatatacctcaatgacttcgcgcgcgtggtgagcagcgaccatgaggccgtgaacggcatcctgcacttcattgaccgtgtcctgctgccccccgaggcgctgcactgggagcctgatgatgctcccatcccgaggagaaatgtcaccgccgccgcccagggcttcggttacaagatcttcagcggcctcctgaaggtggccggcctcctgcccctgcttcgagaggcatcccataggcccttcacaatgctgtggcccacagacgccgcctttcgagctctgcctccggatcgccaggcctggctgtaccatgaggaccaccgtgacaagctagcagccattctgcggggccacatgattcgcaatgtcgaggccttggcatctgacctgcccaacctgggcccacttcgaaccatgcatgggacccccatctctttctcctgcagccgaacgcgggccggtgagctcatggtgggtgaggatgatgctcgcattgtgcagcggcacttgccctttgagggtggcctggcctatggcatcgaccagctgctggagccacctggccttggtgctcgctgtgaccactttgagacccggcccctgcgactgaacacctgcagcatctgtgggctggagccaccctgtcctgaggggtcacaggagcagggcagccctgaggcctgctggcgcttctacccgaagttctggacgtcccctccgctgcactctttgggattacgcagcgtctgggtccaccccagcctttggggtaggccccaaggcctgggcaggggctgccaccgcaattgtgtcaccaccacctggaagcccagctgctgccctggtcactatggcagtgagtgccaagcttgccctggcggccccagcagcccttgtagtgaccgtggcgtgtgcatggacggcatgagtggcagtgggcagtgtctgtgccgttcaggttttgctgggacagcctgtgaactctgtgctcctggtgcctttgggccccattgtcaagcctgccgctgcactgtgcatggccgctgtgatgagggccttgggggctctggctcctgcttctgtgatgaaggctggactgggccacgctgtgaggtgcaactggagctgcagcctgtgtgtaccccaccctgtgcacccgaggctgtgtgccgtgcaggcaacagctgtgagtgcagcctgggctatgaaggggatggccgtgtgtgtacagtggcagacctgtgccaggacgggcatggtggctgcagtgagcacgccaactgtagccaggtaggaacaatggtcacttgtacctgcctgcccgactacgagggtgatggctggagctgccgggcccgcaacccctgcacagatggccaccgcgggggctgcagcgagcacgccaactgcttgagcaccggcctgaacacacggcgctgtgagtgccacgcaggctacgtaggcgatggactgcagtgtctggaggagtcggaaccacctgtggaccgctgcttgggccagccaccgccctgccactcagatgccatgtgcactgacctgcacttccaggagaaacgggctggcgttttccacctccaggccaccagcggcccttatggtctgaacttttcggaggctgaggcggcatgcgaagcacagggagccgtccttgcttcattccctcagctctctgctgcccagcagctgggcttccacctgtgcctcatgggctggctggccaatggctccactgcccaccctgtggttttccctgtggcggactgtggcaatggtcgggtgggcatagtcagcctgggtgcccgcaagaacctctcagaacgctgggatgcctactgcttccgtgtgcaagatgtggcctgccgatgccgaaatggcttcgtgggtgacgggatcagcacgtgcaatgggaagctgctggatgtgctggctgccactgccaacttctccaccttctatgggatgctattgggctatgccaatgccacccagcggggtctcgacttcctggacttcctggatgatgagctcacgtataagacactcttcgtccctgtcaatgaaggctttgtggacaacatgacgctgagtggcccagacttggagctgcatgcctccaacgccaccctcctaagtgccaacgccagccaggggaagttgcttccggcccactcaggcctcagcctcatcatcagtgacgcaggccctgacaacagttcctgggcccctgtggccccagggacagttgtggttagccgtatcattgtgtgggacatcatggccttcaatggcatcatccatgctctggccagccccctcctggcacccccacagccccaggcagtgctggcgcctgaagccccacctgtggcggcaggcgtgggggctgtgcttgccgctggagcactgcttggcttggtggccggagctctctacctccgtgcccgaggcaagcccatgggctttggcttctctgccttccaggcggaagatgatgctgatgacgacttctcaccgtggcaagaagggaccaaccccaccctggtctctgtccccaaccctgtctttggcagcgacaccttttgtgaacccttcgatgactcactgctggaggaggacttccctgacacccagaggatcctcacagtcaagtgacgaggctggggctgaaagcagaagcatgcacagggaggagaccacttttattgcttgtctgggtggatggggcaggaggggctgagggcctgtcccagacaataaaggtgccctcagcggatgtgggccatgtcaccaaaaa

SEQ ID NO: 22544 - DNA, 6394 bp, Homo Sapiens
ggacccactgggttgccaagctcgcgccggatgcggagcgcggtgctgccggtggagcttcaggtcttgatagactttctgtaaagaaggaatgatttggtgatggagtgttcccactgaccgatggactcaaagaagagaagctcaacagaggcagaaggatccaaggaaagaggcctggtccatatctggcaggcaggatcctttcccataacaccagagagattgccaggctggggaggaaagactgttttgcaggcagccctcggagtgaaacatggagttcttctgactgaagatggtgaggtctacagctttgggactcttccctggagaagtggaccagtggagatttgtccaagtagccccattctagaaaatgccctggttgggcaatatgttattactgtggcaacaggaagcttccatagtggagcagtgacagacaatggtgtcgcgtacatgtggggagagaattctgctggccagtgtgcagtagccaaccagcagtatgtgccggaaccaaatcctgtcagcattgctgattctgaggccagccctttgttagcagtcaggattttacagttggcgtgtggcgaggagcacactctggcattgtcaataagcagagagatttgggcatggggtaccggttgtcagttgggtctcattaccactgccttcccagtgacaaagccgcaaaaggtagaacatcttgctgggcgagtggtgcttcaagttgcctgtggtgctttccacagcttagcccttgtacaatgcctcccttcccaggatctgaagccagtcccagaacgatgcaaccagtgcagccagctcttgattactatgactgacaaagaagaccatgtgattatatcagacagtcattgttgcccattaggtgtgacactgacagaatctcaggcagaaaaccatgccagcactgctctcagcccctccactgaaacccttgacaggcaggaagaagtatttgagaacactcttgtagcaaatgatcagtctgttgctactgaactgaatgcagtaagtgctcagatcacaagcagcgatgccatgtcctctcaacaaaatgtcatgggaacaactgaaatttcctctgccagaaacataccatcataccctgacacccaagcagtcaatgaatacctacggaaactgtcagatcattcagtaagagaggactcagagcatggtgaaaagccaatgccatctcagcctcttttagaagaagcaattcctaatctccacagcccgcctaccacaagcacctcagccctaaacagcctggtggtctcttgtgcatctgctgttggtgtgagagtggctgctacttatgaagctggtgccttgtcactgaagaaagttatgaacttttatagtacaaccccttgtgaaactggagctcaggcaggcagtagtgccattggccccgaaggtttgaaagatagcagggaagaacaggttaaacaggaatcaatgcaaggaaagaaaagttcaagtcttgtggatatcagagaagaagaaacagagggaggcagtcgaagactctccctccctggattgttgtcacaagtttcccccaggctcttaagaaaggctgcacgggtgaaaacgaggacagtggttctgacccccacatacagtggagaagcagatgcgctcctgccttctctgagaacagaagtgtggacctgggggaaagggaaggaagggcagctggggcacggcgatgttctgcctaggcttcaaccgttgtgtgtaaaatgtctggatggcaaagaagtaatccatctggaggcaggtggttaccattctcttgcacttactgcgaaatcccaggtttactcatggggtagcaatacctttggtcaacttgggcattccgattttccaacaacagttcctcgtcttgcaaagataagcagtgaaaatggagtctggagcatagctgcaggcagggattattccctgtttttagtggatacagaagacttccagcctgggttatattacagtggccgacaggaccctacagaaggtgacaaccttccagagaatcacagtggttctaagactccagtacttctctcctgtagtaagcttggatatataagcagagtgacagcaggaaaagatagctatttagccttggtggataaaaacattatggggtatattgccagtctccacgagttagctactacagaaagacgattctattcaaaactaagtgatatcaaatctcagattctcaggcctcttctcagtttagaaaatttgggcactacaactacagtccagctgttgcaggaggtggctagccgattcagcaagctgtgttacctcattggtcagcatggagcctcattgagcagcttccttcatggggtaaaggaagccaggagtttggtcatcctgaagcattcaagtctcttcttggatagttatacagagtattgcacatctattacaaatttcctggttatgggaggattccagcttcttgctaagcctgccattgatttcctaaataaaaaccaagagctgttgcaagatttgtcagaagtgaatgacgaaaacactcagttgatggaaatactgaatactttgtttttcttgccaatcagacgacttcataattacgcaaaagttttgctaaagcttgctacttgttttgaagtggcatctccagaatatcagaaactgcaggattccagttcttgttatgagtgtcttgctctccatctcggcaggaaaaggaaggaagcagaatacacactgggcttctggaagaccttccccggaaaaatgacggattccttgaggaagccagagcgtcgactgctgtgtgagagtagtaaccgagccctgtctctgcagcatgctgggaggttttccgtgaattggttcattctctttaatgatgccctggtccatgcccagttctccacgcaccatgttttccctctggccacgctgtgggcagagccactgtctgaagaagctggtggtgtgaatggcttaaagataactacacctgaggagcagttcactctcatttcatctacaccccaggaaaagacaaagtggctacgagctataagccaagccgtagatcaggctttgagagggatgtctgatctccccccttatggaagtggtagcagtgttcagagacaggaaccacccatttcacgcagtgccaaatatactttctacaaggatcctcgcctaaaggatgccacctatgatggacgctggctttcagggaagcctcatggcagaggggttttgaagtggcctgatggaaagatgtattctggcatgttcaggaatggcttggaagatgggtatggagaatacagaatcccaaacaaggcaatgaacaaagaagaccattatgtgggccattggaaagaaggaaaaatgtgcggtcaaggagtctacagctatgcttctggtgaagtatttgagggctgttttcaagataatatgcgtcatggtcatggtcttctacgaagtgggaaattgacgtcctcttctcctagtatgttcattggccagtgggtaatggataagaaagcaggatatggtgtctttgatgatatcactaggggggaaaagtatatgggaatgtggcaagatgatgtgtgtcaagggaatggtgtggtggttacccagtttggattatactacgagggcaactttcaccttaataaaatgatgggaaatggggttttgctttccgaagatgatactatctatgaaggagaattttcagatgactggactcttagtggaaagggaacactgactatgccaaatggagactacattgaaggttattttagtggagaatggggatctgggataaaaatcactggaacctacttcaaacctagtctatatgagagtgataaagacagacctaaagttttcaggaagctaggaaacctggcagtgccagctgatgagaagtggaaagcggtgtttgacgaatgttggcgccaactgggctgtgagggcccaggccaaggggaagtttggaaagcatgggacaatattgctgtggccttgaccaccagtcggcgccagcacagagacagtccagaaatattgagtcgttcacagactcagacactagagagtttggaattcattccacagcatgttggtgccttctctgtggagaaatatgatgacatcaggaaatatttaataaaggcctgtgacactcctctgcaccccctgggcaggcttgtggagacactggttgcagtgtatagaatgacatacgtgggcgtaggagccaaccgcaggttattgcaggaggctgtaaaggagattaagtcctatcttaagcgaattttccagctggtgaggttcttatttcctgagctgcctgaagaaggcagcacaattcctctctctgctcctctgccaaccgaaaggaagtctttttgcactgggaagtcagattcccgatctgaatcaccagagccaggttatgtagtaacgagttctggattattgcttcctgtgctgctacctcggctctacccaccgctgtttatgctttatgctttggataatgatcgcgaggaagacatttactgggaatgtgtccttcgactaaataagcagccagatattgctctcctgggctttcttggggtgcagaggaaattttggccagcaaccttgtcaatccttggagagagtaaaaaggttttgccaaccacgaaagatgcttgttttgcctcagcagtagaatgtctgcagcagatcagcacaacatttaccccatcagacaaacttaaggtcatccagcagacttttgaggagatctctcagagtgtcctggcgtcactccacgaagacttcttgtggtccatggatgacttgtttcctgttttcttatatgtggtgctacgggccaggattaggaatttaggctctgaggtacacctcattgaggatctaatggacccctatcttcagcatggggaacagggtataatgttcaccaccttgaaggcatgttactaccagattcagcgtgagaagcttaactaggctgcataacagcttgaaaactggattatctactacagagtgttataacaccatctggagtcttcctgtagtggcaaaaaagaacagtgttgaaattggaaaggactttgtgttatttaggttgttagaatgagccttaccaataataagagccctgagcccagaaaaaaggactgtatagtttaaagggaggattgaaagggaggtaaaaaatcagattagaccagttcttggcctatgataagttccaaaaataccatttatctactatttgaaaaaagaagaggatatcccttcctacagtaaagggtatgtcagctacatgaagttgtaagaaaagcttccagtagagcttcttatattaaagaagttgatggatatttttgaatttctggtttgcctgaatccacctgcagttaccccgatccgtttgcaagaaccagatcgtacttgaaactatagtggccacactctgccttcctgagtcccttccagtcatgtgtgcatcatgtctctttgccaagggaggggagaaaggaacttttaaactgcagttttaactttttctaagctgtttcttgatgggagaggttctgtgcaaaactaccacattctgtccccaaaatgtggaatgcatccaaataggagtcttctgcctcttaacttaaaagaacataggaattttgtttttggtttctttatcatgctacagagagtgaatacactggaattcagacaccgactctgagctgctaggaacctcatttgtccatgtgcaaacgctgtattccaaggcctgtgaatggcagcctgaggaagttttgcatgcaggctgtgttttcgagcaggactaacaactgggaaataagcaaaaaactgcatcgatccccagcctggtgttgttcttccctatacttcacactgaactcaggatgggaagaaaaaggaaacaagctttggctttttccatctcaaaagtattgtggcacctcaacatttcagtgttttgctttttaaaaaatgccctattgtaagttgttggtttatactgtataagtaacactagtagctgttttgaataacataggtgctcttcctcatctcatctcctacaccgtggtgagcatacagagtgtcctgatttgtgttaagtgactgagaagatgttaattacttttgaaaaaggatcatggtttttgctctactttataatcaagacaagtgtttattaaaatactgttttggaatgttggctgtaatgtaacagcaattttcataataaaaggcattcatcttt

SEQ ID NO: 22545 - DNA, 643 bp, Homo Sapiens
tgccgcgcggcacacaatatttatttaattgcccaactaccactgatgaagatatattggagtgactgctgaaattgcctttttgtttttaaccagaggacagtccatttgtttcacttctttttgctttccttactgctatgagctttactgaacggctgaaaaacttggaaaataaaatggacatgctgtagtcttgaacataatttttttaaggaaaacttaaagtgccagagtgaaagccagaatggcatccagagagaggctctttgaactttggatgctttattgtacaaagaaagatccagattacctgaagctgtggttggacacttttgtttctagctatgaacaatttttagacgttgactttgaaaagctgcctaccagggtagatgatatgcctccaggaatatctctgcttcctgataatattctgcaggttctgaggatccagcttctacagtgtgttcagaaaatggcagatgggttagaggaacaacagcaagccttgtcaattttgcttgtcaagttcttcattattctttgcagaaatctatcaaatgtggaagaaattgggacttgctcgtacattaattatgtcatcaccatgacaacactctatattcagcaattaaaaagc

SEQ ID NO: 22546 - DNA, 9859 bp, Homo Sapiens
gcctccgtctctcgctgggctcgctagggctgcgcgttgggccagcgggggcgccgcagctgaagccgccccggagccggtgaaccgaattacctcgagggaggggcgtggggaaggcggcgggaggaggagcgcacgggccggctgccgtgcccaccacggctgaggaacatggttttcgagtcggtggtcgtggacgtgttgaaccggttcttgggggactatgtggtggacttggacacgtcccagctctctctgggcatctggaaaggagctgtggccctcaagaatcttcaaattaaagaaaatgccctgagtcaactggatgtaccatttaaagttaaagttggtcacataggtaatcttaaacttataattccatggaaaaacctttatactcaacctgttgaagccgtattggaagaaatttatttacttatagtgccttcttctagaataaaatatgatcctttaaaagaagagaaacaactcatggaagcaaagcaacaggaactgaaaagaatagaagaagcaaaacaaaaagtagttgatcaagaacaacatctgccggaaaaacaggacacttttgcagaaaaattagttacacagatcataaaaaatcttcaggtgaaaatttccagtatccatattcgttatgaagatgatatcacaaatcgggacaaaccgctgtcatttggtatttcccttcaaaatctgagcatgcagacaactgatcaatactgggttccatgtttacatgatgaaactgagaaactggttcgtaagttaatccgattggataacctgtttgcctattggaatgtgaagtctcagatgttttatcttagtgattatgataactccttggacgacttgaagaatggcattgtcaatgaaaatattgttccagaaggttatgattttgtatttcgtcccatatctgctaatgccaaacttgtgatgaatcgccgatctgattttgacttttctgcccccaaaataaacttggaaattgagttacataacatagcaattgaatttaataaaccacagtatttcagtattatggagcttcttgaatcagttgatatgatggcacaaaatctgccatataggaagttcaaacctgatgtgcctcttcaccaccatgccagagaatggtgggcttatgctatacatggcgttcttgaagtaaatgtttgccccaggttatggatgtggtcatggaagcatattagaaaacataggcaaaaagtgaagcaatataaagaactgtataaaaaaaagttaacaagtaagaagccacctggtgaacttctcgtgtctttggaggagttggaaaaaaccttggatgtctttaatataactatagctagacagacggcagaagttgaggtaaagaaagctggatacaaaatttacaaagaaggagtaaaagatccagaggataataaagggtggtttagctggctatggtcttggtcagaacaaaatactaatgaacagcaaccagatgttcaacctgaaactcttgaagaaatgttgacacctgaagaaaaagctttactctatgaagcaattggctatagtgaaacagcagttgatccaactttactaaaaacatttgaagccttgaagttttttgtccacttgaaaagtatgtctattgttctaagagaaaatcatcaaaaacctgagctggtagatattgtaatagaagaatttagcaccttaattgtgcaaagaccaggagcacaagcaataaaatttgaaactaaaatagattcatttcatattactggcttaccagataattcagaaaaaccccgcctcctgtcttcattggatgatgcaatgtcacttttccaaattacatttgagataaatccattagatgaaactgtttctcagaggtgtatcatagaagctgaacctttagaaatcatatatgatgcaaggacagtgaatagtatagtggaattcttcagacctccaaaagaggtacatctagcacagctcactgcagcaactttgacaaaactggaagaatttcgcagtaagacagcaacaggtctactgtatattattgaaacacagaaagttcttgatctcaaaattaatttgaaggcttcatatattattgtcccacaagatggaatttttagtcctacatcaaatctgcttcttttggaccttggtcatctaaaggtgacgagtaaaagtcgttctgaattaccagatgtgaaacaaggtgaggccaatcttaaagagataatggatagagcttatgattcatttgatattcaacttacaagtgtacagctgctttacagtagagttggtgataattggagagaagcacgaaaactcagtgtatctacccagcatattttggtacccatgcacttcaatttggaactgtctaaggccatggttttcatggatgtaaggatgcccaaattcaagatttatggaaagttacctcttatttctttacgaatctcagataaaaaactacaagggattatggaattgattgaaagcattccaaaacctgaaccagtaactgaagtatctgcccctgtcaaatcattccagattcaaacatctacttctttgggaacatcacagatttcacagaaaataattcctctcttggaacttccatctgtttctgaagatgattcagaggaggaattttttgatgcaccatgtagtcccttggaagaacctcttcagtttccaactggagttaaaagtattcgaaccagaaagttacaaaagcaggattgttcagtaaatatgactacatttaaaataagatttgaagtaccaaaggttttgatcgagttttatcaccttgttggagattgtgaactatctgtggtagaaattcttgttttaggattgggtgcagaaattgagattagaacatacgatttgaaagcaaatgcctttttgaaagagttctgcttaaaatgcccagaatacttggatgaaaacaagaaaccagtttatttggttacaaccctggataacacaatggaagacctgttaacgctggaatatgtaaaggctgaaaagaatgtacccgacttgaaaagtacctataacaatgttttacaattgattaaggtaaatttttcctctttggatattcatttacacactgaagcacttctgaatacaataaattatcttcataatatccttccgcaatcagaggaaaaatcagccccagtgtccactacagagactgaagacaaaggagatgtcattaaaaaattagctttaaaactatccacaaatgaagatatcattactttgcagattttagcagaattatcgtgtttacagatctttattcaagatcagaaatgtaacatttctgaaattaagattgaagggcttgattctgagatgattatgaggccttcagaaactgaaataaacgcaaagctaaggaatataattgttttagattctgatataacagctatatacaaaaaggctgtttatatcactggaaaagaagttttcagcttcaaaatggtttcttacatggatgcaactgctggttctgcatacacagatatgaatgtggttgacattcaggttaatttaatagttggttgcattgaagtagtttttgtcacgaaatttctatattctatattggcttttatagataattttcaggcagctaaacaagccttggctgaggcaactgttcaggcagctggaatggctgctactggtgtaaaagaactcgcacaaaggagttccagaatggcactggatattaacatcaaagccccagttgtggtcatcccgcagtctccagtttctgaaaatgtttttgttgctgattttggactaattacaatgacaaatacctttcatatgataacagagagccagagctctcccccacctgttattgatttgataacaataaagctgagtgaaatgcgactatacagatctcgatttattaatgatgcataccaggaagtactggatctactcctgccattaaatcttgaggttgtggttgaacgaaatttatgctgggagtggtaccaggaagttccttgttttaatgtaaatgctcagctgaaaccaatggagttcattcttagtcaagaagatataacaactatttttaaaacattgcatggcaatatatggtatgaaaaagatggtagtgcctcacctgctgtaacaaaagaccaatacagtgccactagtggagttactactaatgcttcacaccattcaggaggagcaactgtggtgacagctgctgtggtagaagtacattcacgtgccttactagttaagacaacactaaacataagcttcaaaactgatgatctcaccatggtgctgtatagtccaggtcctaaacaggcttcctttacagatgttcgtgatccttctctgaaacttgctgaatttaaattggagaatattataagtactttaaaaatgtatacagatggctcaacattttcttccttctcattaaaaaactgtattttagatgataaaagacctcatgtcaagaaagcaactcctcgaatgataggactgacagttggttttgacaaaaaagacatgatggatataaagtacaggaaagtcagagatggttgtgtgactgatgcggtctttcaagaaatgtatatttgtgcaagcgtagaatttctgcagactgttgcaaatgtctttcttgaggcctacaccacaggcactgctgtagaaaccagtgtgcaaacatggactgctaaggaagaagtacctacacaggaatcagtgaagtgggaaattaatgttattattaaaaatcctgaaattgtgtttgtagctgacatgacaaaaaatgatgctcctgctttagtcattacaacacaatgtgaaatttgctataaaggtaaccttgaaaatagtacaatgactgctgccattaaagatctccaagtgagagcctgcccgtttcttccagtcaagagaaaaggcaaaatcactactgttttgcagccctgtgacttgttttatcaaactactcagaaaggtacagatccacaagtgatcgatatgtcagtaaaatccctgacactaaaggtttcaccagttattataaatactatgattaccataacttcagcactgtatacaactaaggaaaccatcccagaagaaacggcttcttctactgcacatttatgggaaaagaaggatacaaagactttaaaaatgtggtttcttgaagaatcaaatgaaactgaaaaaatagctcccacaactgaattggtacccaaaggcgagatgataaaaatgaacattgattctatttttatagttcttgaggctggaattggtcatagaacagtacctatgcttctggcaaagtcacgtttttcaggggaaggcaaaaactggagttccctaataaatctgcactgtcagcttgagctagaagtgcattattataatgaaatgtttggtgtatgggagcctttgcttgaacccttagaaattgatcagactgaggattttagaccatggaatcttggtatcaagatgaaaaagaaagcaaaaatggccattgttgagtcagatcctgaagaagaaaactacaaagtgccagaatataaaactgtcatcagtttccattcaaaagaccaattaaacattacattatccaaatgtggtcttgtaatgttaaacaatttagtcaaggcatttacagaagctgccactggatcttcagctgacttcgtaaaggatctagcaccatttatgattttaaattcccttggacttactatttctgtttcgccaagtgattcttttagtgtactcaacattcctatggcaaaatcatatgtattgaaaaatggagaaagtttaagtatggattatatccgaaccaaggacaatgatcatttcaatgcaatgaccagcctaagcagcaaactcttcttcattcttcttacacctgttaaccattctactgctgataagattcctttaacaaaagtgggacgacgtctgtacactgtaagacacagagagtctggcgttgaaagatctattgtttgtcaaattgatacagtagaaggaagtaagaaggtcacaattcgctccccagtgcagataagaaatcatttttcagtcccactgtctgtttacgaaggggataccttattgggaactgcctcacctgaaaatgaattcaacataccattaggatcttaccgatcattcatttttctgaagccagaagatgagaactatcaaatgtgtgaaggaattgactttgaagagattataaaaaatgatggtgctcttctaaagaagaaatgtagatctaaaaacccttctaaggaatcatttctcattaatattgttccagaaaaagataatttaacatctctatcagtgtattcagaagatggttgggatttaccatacataatgcatttgtggccacctatcctgctccgaaatcttcttccttacaaaattgcttattatatagagggaattgaaaattcggtttttactctaagtgaaggacattcagcccagatttgtactgcacagttgggtaaagccaggctacatttaaaattacttgactatctcaatcacgattggaaaagtgaatatcacataaagcctaatcagcaagacattagttttgtcagttttacttgtgttacagaaatggaaaagactgatttagatattgctgtccatatgacttacaatactggtcagacagttgtggcatttcatagtccttattggatggtcaataaaactggccgcatgttacagtacaaagcagacggaattcatcgaaagcatccacctaattataaaaagccagttctcttttcttttcagccaaatcacttttttaataacaataaggttcaacttatggtaactgatagtgagttgtccaatcagttttcaattgatactgttggtagtcatggagctgttaaatgtaaaggcctgaaaatggactatcaagttggtgtcactatagacctgagcagttttaacattactagaattgtgacatttacccctttttatatgattaaaaacaaaagcaaataccatatatcagtggctgaagaaggaaatgataaatggctctctcttgatttggagcagtgtatccccttttggcctgagtatgcttctagtaaacttcttattcaagtcgaaaggagtgaagatcctcccaaaaggatatattttaacaagcaggaaaattgtattctattgcgtctagataacgagcttggaggtattatagcagaagtgaatttggccgagcattctacagttattacatttttagattatcatgatggagcagctacattcctcttaataaatcacacaaagaatgaacttgttcaatacaatcaaagttctctcagtgaaatagaagattccctccctcctggtaaagccgtgttttatacatgggctgatccggtgggctctagaaggctgaagtggagatgtagaaaaagccatggtgaagtaacacagaaggatgatatgatgatgcctatagatttgggggaaaagacaatatatttagtttcattctttgaaggtttacaacgcattattttattcactgaagatccaagggtatttaaagtaacatatgaaagtgagaaagcagagttagcagagcaagaaattgcagtggcattacaagatgttggaatttctcttgtcaacaattacacgaagcaagaagtagcctatataggcattacaagttctgatgtggtttgggaaacaaagcccaagaagaaggcaagatggaagccaatgagtgtaaagcacactgagaagttagagagagaatttaaggaatatactgaatcttctccttcagaagataaggttattcagttggacactaatgttccggttcgcctaacccctactggtcataacatgaaaattctgcagccgcatgtaatagctctacgaagaaattatcttccagcattaaaagtggaatataacacatctgcacatcaatcatcatttagaattcagatttacagaatacagatccaaaatcagatacatggtgctgtatttccctttgtgttttatcctgttaaacctccaaagtcggtcaccatggattcagcaccaaagccctttacagatgtcagtattgtcatgagatctgcaggacattcccagatatcacgtattaagtatttcaaagtattgattcaagaaatggatctcaggttagatcttgggtttatctatgctttaacagaccttatgacagaagctgaggtgactgaaaatacagaggttgagctttttcataaagatatagaagctttcaaagaagaatataaaacagcctcattagtagatcaatcacaagtcagcctctatgaatattttcatatatctcctatcaagttacatttaagtgtttcactgagttccggcagagaagaagctaaagattcaaaacaaaatggaggactgattccagttcattctttaaatcttttgctgaagagtattggtgccacactgacagatgtacaagatgtagtttttaagcttgcattttttgaactcaactatcagttccatacaacatccgatctacagtctgaagtcataagacactattcaaaacaggccattaagcagatgtatgtactcattcttggacttgatgttttgggaaatccatttggcttaattagagaattttctgaaggtgtagaagcatttttttatgaaccttaccagggagccatccagggtcctgaagagtttgtggaaggaatggcactaggacttaaggcactagttggtggagctgttggtggattggctggtgctgcctccaaaatcaccggtgctatggctaagggggtagcagctatgaccatggatgaagactaccaacagaagagaagagaagccatgaataagcaaccagctggttttagagaaggcatcactcgtggaggaaaaggcttagtttctggatttgttagtggcataacaggaattgttacaaaaccaatcaaaggagctcaaaaaggaggagcagctggtttctttaaaggtgttgggaaaggtttagtaggagcggtagcaaggccaactggaggcatcatagacatggctagcagtacatttcaggggataaaaagagctacagagacttctgaagtggagagtctgcgacctcctcggttcttcaatgaagatggagttatcagaccgtacaggttgagggatgggactggaaatcaaatgttacagaaaattcaattctacagggagtggattatgactcacagtagcagtagtgatgatgatgatgatgatgatgatgatgatgagtcagatctaaaccattaaaattcatatgttctttattttacttggaatgtttcattaacatgttttgtatgacttataccataatgcccatatgtccatttatagggaggtaaaacacattttcttttaaaatgttttcctacacattttcataaagcaaaataattgtattatttaagcacagaaaaaaatgtatcttacatccaaagtagggagggcatccaacatattatagatttgcttttatatattttatagctttgtattgcatagtttgtctttaagagttcaagttagacttaaatataattttgatgttcactggttttattttaaattgccttcttatttgttagcaaaatgcctttttttaatggtctctgtaaattttctgggctttaatgtaatgccactgtgt

SEQ ID NO: 22547 - DNA, 1857 bp, Homo Sapiens
gcatcccagctccactcccaggctctgggggctggggagtggttaccaagcctcctctctccttctgtcccactgccctctccccgtctctagctcagaggccccactggaccctcggctcttccttggacttcttgtgtgttctgtgagcttcgctggattcagggtcttgggcatcagaggtccgccgcgatggggaagccctggctgcgtgcgctacagctgctgctcctgctgggcgcgtcgtgggcgcgggcgggcgccccgcgctgcacctacaccttcgtgctgcccccgcagaagttcacgggcgctgtgtgctggagcggccccgcatccacgcgggcgacgcccgaggccgccaacgccagcgagctggcggcgctgcgcatgcgcgtcggccgccacgaggagctgttacgcgagctgcagaggctggcggcggccgacggcgccgtggccggcgaggtgcgcgcgctgcgcaaggagagccgcggcctgagcgcgcgcctgggccagttgcgcgcgcagctgcagcacgaggcggggcccggggcgggcccgggggcggatctgggggcggagcctgccgcggcgctggcgctgctcggggagcgcgtgctcaacgcgtccgccgaggctcagcgcgcagccgcccggttccaccagctggacgtcaagttccgcgagctggcgcagctcgtcacccagcagagcagtctcatcgcccgcctggagcgcctgtgcccgggaggcgcgggcgggcagcagcaggtcctgccgccacccccactggtgcctgtggttccggtccgtcttgtgggtagcaccagtgacaccagtaggatgctggacccagccccagagccccagagagaccagacccagagacagcaggagcccatggcttctcccatgcctgcaggtcaccctgcggtccccaccaagcctgtgggcccgtggcaggattgtgcagaggcccgccaggcaggccatgaacagagtggagtgtatgaactgcgagtgggccgtcacgtagtgtcagtatggtgtgagcagcaactggagggtggaggctggactgtgatccagcggaggcaagatggttcagtcaacttcttcactacctggcagcactataaggcgggctttgggcggccagacggagaatactggctgggccttgaacccgtgtatcagctgaccagccgtggggaccatgagctgctggttctcctggaggactgggggggccgtggagcacgtgcccactatgatggcttctccctggaacccgagagcgaccactaccgcctgcggcttggccagtaccatggtgatgctggagactctctttcctggcacaatgacaagcccttcagcaccgtggatagggaccgagactcctattctggtaactgtgccctgtaccagcggggaggctggtggtaccatgcctgtgcccactccaacctcaacggtgtgtggcaccacggcggccactaccgaagccgctaccaggatggtgtctactgggctgagtttcgtggtggggcatattctctcaggaaggccgccatgctcattcggcccctgaagctgtgactctgtgttcctctgtcccctaggccctagaggacattggtcagcaggagcccaagttgttctggccacaccttctttgtggctcagtgccaatgtgtcccacagaacttcccactgtggatctgtgaccctgggcgctgaaaatgggacccaggaatcccccccgtcaatatcttggcctcagatggctccccaaggtcattcatatctcggtttgagctcatatcttataataacacaaagtagccacag

SEQ ID NO: 22548 - DNA, 2919 bp, Homo Sapiens
  misc_feature (1341)..(1341): n is a, c, g, or t
atggcgacgcggggccatgtgcaggaccctaacgacaggcgcctccggcccatttacgattatcttgacaatggtaataataaaatggcaattcagcaagcagataaactgttgaagaaacataaggatcttcattgtgctaaggttttaaaggcaattggtttacagagaactggaaagcaagaggaagcctttactcttgcacaggaggtggcagcccttgaacccacagatgacaactcactgcaggcactgactatcctttaccgggagatgcaccgaccggagttagttacaaaactttatgaggcagctgtgaagaaagttcccaatagtgaggagtatcactctcacctcttcatggcctatgccagagtgggtgaatacaagaaaatgcaacaggctggcatggctctatataagattgtccccaaaaatccctactacttttggtctgtgatgagcttaattatgcaatctatatcggcacaggatgaaaacctctcaaaaacaatgtttctgccccttgctgagagaatggtcgaaaaaatggtgaaagaggacaagatagaagctgaggctgaagttgaactttattatatgatcctggaacgtttgggaaagtaccaggaggccttggatgtcatcagagggaaattaggagagaagttgacaagtgagattcagagtcgggaaaataaatgcatggctatgtacaagaagctgagcaggtggccagagtgcaatgccctttcccggcgcctcttactaaaaaactcagatgactggcagttctatctgacttatttcgattctgtctttcgactgattgaagaggcctggagtcctcctgctgaaggtgaacactctttagaaggagaagtacattattctgcagaaaaagctgtgaagtttatagaagatcggataacggaagaatctaaaagttctcgccatctccgaggaccacatctagctaaattggagctgattaggcgtttacgaagtcaaggttgtaacgatgagtacaaactgggtgatccagaagaattaatgttccagtattttaaaaagtttggcgataaaccttgttgttttacagaccttaaggtgtttgttgacctcttacctgctacacagtgtacaaaatttattaatcagttacttggagttgttcctttgtcgacaccaacagaggataagctggcactgcctgctgacatcagagctctgcagcaacatttgtgtgtggtgcagctgacgaggttacttggcttgtaccacaccatggataaaaatcagaaattgagtgtggtcagagaattgatgttaaggtaccancatggactggaatttgggaaaacctgtttgaaaacagaattgcaattttctgactattactgtctccttgctgtccatgcgcttattgatgtatggagggaaacaggtgatgagaccactgtgtggcaggccctgactttgctggaagagggattaacccatagcccttccaatgctcagttcaaattgctgcttgttcgaatctactgtatgctgggtgcatttgaaccagtggtggatctttactccagcctcgatgctaagcatatccagcatgataccattggttatcttttgacccgatatgctgaatctctaggtcagtatgctgctgcgtcccaatcctgtaacttcgcactcaggttttttcactccaaccagaaagatacctcagaatatattattcaagcttacaaatatggtgcatttgagaagatcccagagtttatcgcttttaggaacaggctgaataattctcttcattttgcacaagtccgtactgaacggatgctgttagaccttctacttgaagcaaatatatcaaccagtttagcagaaagtataaagtcaatgaaccttaggccagaagaagatgacattccatgggaagatttgcgagacaacagagacttaaatgtttttttcagctgggatccaaaagacagggacgtttctgaagaacataagaaactttccttagaggaggagaccttgtggttaagaatccgatccttaacattgaggctgataagtggacttccaagtctcaaccaccctgtggagccaaagaactcggagaagactgccgagaatggggtatcctcccggattgatattcttcgtttgctccttcaacagctggaggcaaccctggagacaggaaagcgatttattgagaaggatattcagtatcctttccttggtcctgtacctaccagaatgggtggattctttaattctggctgttctcagtgccagataagctctttttatcttgtcaatgatatttatgagctggataccagtggtttagaggatacaatggagattcaggaacgaatagaaaatagttttaagtctttactagaccagttaaaagatgtcttcagtaaatgtaaaggtgacctcttagaagttaaagatggtaacttgaaaacacatcctactcttttagaaaatctagttttctttgttgagactatttctgttatcctttgggtatccagttactgtgagagtgtcctacgaccatacaaactaaatttacagaaaaagaaaaagaagaaaaaagaaaccagcatcatcatgccacctgtctttaccagtttccaagactatgttactgggcttcagactttaatttccaatgttgtggatcatattaaagggcttgaaacacatctaattgcacttaaacttgaagaacttattttagaagacacttctctctcaccggaagagagaaaattttcaaagactgtgcaagggaaggtgcagagcagttatctgcactcacttctggaaatgggggagctgctgaaaaaaagacttgagaccacaaagaaactaaaaatttaa

SEQ ID NO: 22549 - DNA, 2974 bp, Homo Sapiens
cggcgggcggcgagcggcgcgcacaatccacgctcggctgcggctctcgggtgtcccaggcccggccggtaagcagagcatggcgggtgcgggcccgaagcggcgggcgctagcggccccggtggccgaggagaaggaagaggcgcgggagaagatgctggcctccaagcgcgcggacggcgcggcgccggcaggcgagggcgagggcgtgaccctgcagcggaacatcacgctactcaacggcgtggccatcatcgtgggcgccatcatcggctcgggcatcttcgtgacgcccacgggcgtgcttaaggaggcaggctcgccggggctggcgctggtgatgtgggccgcgtgcggcgtcttctccatcgtgggcgcgctctgctacgcggagctgggcaccaccatctccaaatcgggcggcgactacgcctacatgctggacgtctacggctcgctgcccgccttcctcaagctctggatcgagctgctcgtcatccggccttcatcgcagtacatcgtggccctggtcttcgccacctacctgctcaagccgctcttccccagctgcccggtgcccgaggaggcagccaagctcatggcctgccactgcgtgcattgacttgatgcaagacatcacaaaggctccatgttatacagtatgcgatttttgagaactgatagtgcatcagctgacccaggtaatttaaaatgttcttcatccagagatagaggtggttcttcctcttacggactgcaaccttcaaattcagctgtggtgtctcggcaaaggcacgatgataccagagtccacgctgacatacagaatgacgaaaagggtggctacagtgtcaacggaggatctggggaaaatacttatggtcggaagtcgttggggcaagagctgagggttaacaatgtgaccagccctgagttcaccagtgttcagcatggcagtcgtgctttagccaccaaagacatgaggaaatcacaggagagatcgatgtcttattgtgatgagtctcgactgtcaaatcttcttcggaggatcacccgggaagacgacagagactgaagattggtcactgtaaagcagttgaaagaatttattcagcaaccagaaaataagctggtactagttaaacaattggataatatcttggctgctgcacatgatgtgcttaatgaaagtagcaaattgcttcaggagttgagacaggagggagcttgctgtcttggccttctttgtgcttctctgagctatgaggctgagaagatcttcaagtggatttttagcaaatttagctcatctgcaaaagatgaagttaaactcctctacttatgtgccacctacaaagcactagagactgtaggagaaaagaaagccttttcatctgtaatgcagcttgtaatgaccagcctgcagtcaattcttgaaaatgtggatacaccagaattgctttgcaaatgtgttaagtgcattcttttggtggctcgatgttaccctcatattttcagcactaattttagggatacagttgatatattagttggatggcatagagatcatactcagaaaccttcgctcacgcagcaggtatctgggtggttgcagagtttggagccattttgggtagctgatcttgcatttcctacgactcttcttggtcagtttctagaagacatggaagcatatgctgaggacctcagccatgtggcctctggggaatcagtggatgaagacgtccctcctccatcagtgtcatcaccaaagctggctgcgcttctccgggtatttagtactgtgctgaggagcattggggaacgcttcagcccaattcgggtcctccaattactgaggcatacgtaacagttgttctgtacagagtaatgagatgtgtgacggctgcaaaccaggtgtttttttctgaggctgtgttgacagctgctaatgagtgtgttggtgttttgctcggcagcttggatcctagcatgactatacattgtgacatggtcattacatatggattagaccaactggagaattgccagacttgtggtaccgattatatcatctcagtcttgaatttactcacgctgattgttgaacagataaatacgaaactgccatcatcatttgtagaaaaactgtttataccatcatctaaactactattcttgcgttatcataaagaaaaagaggttgttgctgtagcccatgctgtttatcaagcaatgctcagcttgaagaatattcctgttttggagactgcctataagttaatattgggagaaatgacttgtgccctaaacaacctcctgcacagtctgcaacttcctgaggcctgttctgaaataaaacatgaggcttttaagaatcatgtgttcaatgtagacaatgcaaaatttgtagttaaatttgacctcagtgccctgactacaactggaaatgccaaaaactcgagtctttaattgtaatgactttgttttatccacagttaagccttttctcattacatatttatgtatttcactgtcatgtcaacatgtctgcagaatcactgtatgtaacaaacagccatatttaagacatgcctggataaataaaattggtaggaatgttttcttgccattatatttaacgtttcttctttttccttgacaaatcttgataagtttttttatattagttttattttctagaaaacgtcttatgaatttctcccatttgctctagcatgcttatagaaaatgtcagtgtttcttacagctcaaatttgtatagttgttttaaaatgcggtctctttcttcttcccctggtacttttttctttctgtctactgaagttagttcttatacatggtcttatattttggctgtctttttttccctaggaacattcatacaggttgaatattccttatctgaaatacttgggactggaagtgttttcgattttggattttggaatac

SEQ ID NO: 22550 - DNA, 1451 bp, Homo Sapiens
agccatggcgacatcctcggccgcgctgccccgaatactcggcgcgggtgcccgggccccgtcgcgctggttgggctttctcgggaaggcgaccccccggcctgctcggccgagccgcaggacgcttggaagcgcgacggcccttatgatccgcgagtcggaggacagcaccgatttcaacgacaagattttgaatgagcccctcaagcactctgacttcttcaatgtcaaggaactgttttccgtgagaagcctcttcgatgcccgagtccatctgggacacaaagctggctgtcggcacaggtttatggagccgtacatctttgggagccgcctggaccacgacatcatcgacctggaacagacagccacgcacctccagctggccttgaacttcaccgcccacatggcctaccgcaagggcatcatcttgtttataagccgcaaccggcagttctcgtacctgattgagaacatggcccgtgactgtggcgagtacgcccacactcgctacttcaggggcggcatgctgaccaacgcgcgcctcctctttggccccacggtccgcctgccggacctcatcatcttcctgcacacgctcaacaacatctttgagccacacgtggccgtgagagacgcagccaagatgaacatccccacagtgggcatcgtggacaccaactgcaacccctgcctcatcacctaccctgtacccggcaatgacgactctccgctggctgtgcacctctactgcaggctcttccagacggccatcacccgggccaaggagaagcggcagcaggttgaggctctctatcgcctgcagggccagaaggagcccggggaccaggggccagcccaccctcctggggctgacatgagccattccctgtgatgttcactctcctcccaaagcaaaccacagccaagcctgtctgagctgggagtccccttccccagccctgggtcagcggcatcctcagtcgttgttacttactcagctgatgtcacagtgcagacatccaccgttccaccacagaaccagtggctgagcggaccaacgttgccatgtgcgtttgctctgtggggaacagagcacagagggtgagcgacatgtgcagaacggccccttggctgcagttaggacctcagtggctggtatggccgagctgctagaagatgctgctgtccctgtgatcccagcagccctcccttcaccgtgacccctgacctttgtcaggaaggtgcagtttttcttctcaatctaaatgcctttcaggtgggccgcttccttggctacctggttccagggggctgttttgtaatgagatgctgctggcaggccactcagaggctcccagctgggttggtgggacagccaggccagatgacctgattccagcaaaaataaaactcagatttgggcaaaatgagaaaaaaaaaaaaaaaaa

SEQ ID NO: 22551 - DNA, 6027 bp, Homo Sapiens
atggtctgcctgggaactggccagagcgctggacccctagtgagtgttcaaaatcattgtcccccttgtggtctttctccccaggaatccctggggttggcactgggccaagcccaggagcccttgcacagcttgttggaggccgctgaggacctggcccaggagctcctggcgctgcgcagcctggtggagcttcgggcactgctgcagagaccccgagggaccagcggccccctggagttgctgtcagaggccctctgcagtgtcaggggacctagcagcacagtgggcccctccctcaactggtacgaggctagtgacctgatggagctggtggggcaggagccagaatccgccctgccagacagcagcctgagccccgcctgctcggagctgattggagccctggacagccacccgctgtcccgcctgctctggagacgcctgaagcctctgatcctcgggaagctactctttgcaccagatacaccttttacccggaagctcatggcccaggtcaaccggaccttcgaggagctcaccctgctgagggatgtccgggaggtgtgggagatgctgggaccccggatcttcaccttcatgaacgacagttccaatgtggccatgctgcagcggctcctgcagatgcaggatgaaggaagaaggcagcccagacctggaggccgggaccacatggaggccctgcgatcctttctggaccctgggagcggtggctacagctggcaggacgcacacgctgatgtggggcacctggtgggcacgctgggccgagtgacggagtgcctgtccttggacaagctggaggcggcaccctcagaggcagccctggtgtcgcgggccctgcaactgctcgcggaacatcgattctgggccggcgtcgtcttcttgggacctgaggactcttcagaccccacagagcacccaaccccagacctgggccccggccacgtgcgcatcaaaatccgcatggacattgacgtggtcacgaggaccaataagatcagggacaggttttgggaccctggcccagccgcggaccccctgaccgacctgcgctacgtgtggggcggcttcgtgtacctgcaagacctggtggagcgtgcagccgtccgcgtgctcagcggcgccaacccccgggccggcctctacctgcagcagatgccctatccgtgctatgtggacgacgtgttcctgcgtgtgctgagccggtcgctgccgctcttcctgacgctggcctggatctactccgtgacactgacagtgaaggccgtggtgcgggagaaggagacgcggctgcgggacaccatgcgcgccatggggctcagccgcgcggtgctctggctaggctggttcctcagctgcctcgggcccttcctgctcagcgccgcactgctggttctggtgctcaagctgggagacatcctcccctacagccacccgggcgtggtcttcctgttcttggcagccttcgcggtggccacggtgacccagagcttcctgctcagcgccttcttctcccgcgccaacctggctgcggcctgcggcggcctggcctacttctccctctacctgccctacgtgctgtgtgtggcttggcgggaccggctgcccgcgggtggccgcgtggccgcgagcctgctgtcgcccgtggccttcggcttcggctgcgagagcctggctctgctggaggagcagggcgagggcgcgcagtggcacaacgtgggcacccggcctacggcagacgtcttcagcctggcccaggtctctggccttctgctgctggacgcggcgctctacggcctcgccacctggtacctggaagctgtgtgcccaggccagtacgggatccctgaaccatggaattttccttttcggaggagctactggtgcggacctcggccccccaagagtccagccccttgccccaccccgctggacccaaaggtgctggtagaagaggcaccgcccggcctgagtcctggcgtctccgttcgcagcctggagaagcgctttcctggaagcccgcagccagccctgcgggggctcagcctggacttctaccagggccacatcaccgccttcctgggccacaacggggccggcaagaccaccaccctgtccatcttgagtggcctcttcccacccagtggtggctctgccttcatcctgggccacgacgtccgctccagcatggccgccatccggccccacctgggcgtctgtcctcagtacaacgtgctgtttgacatgctgaccgtggacgagcacgtctggttctatgggcggctgaagggtctgagtgccgctgtagtgggccccgagcaggaccgtctgctgcaggatgtggggctggtctccaagcagagtgtgcagactcgccacctctctggtgggatgcaacggaagctgtccgtggccattgcctttgtgggcggctcccaagttgttatcctggacgagcctacggctggcgtggatcctgcttcccgccgcggtatttgggagctgctgctcaaataccgagaaggtcgcacgctgatcctctccacccaccacctggatgaggcagagctgctgggagaccgtgtggctgtggtggcaggtggccgcttgtgctgctgtggctccccactcttcctgcgccgtcacctgggctccggctactacctgacgctggtgaaggcccgcctgcccctgaccaccaatgagaaggctgacactgacatggagggcagtgtggacaccaggcaggaaaagaagaatggcagccagggcagcagagtcggcactcctcagctgctggccctggtacagcactgggtgcccggggcacggctggtggaggagctgccacacgagctggtgctggtgctgccctacacgggtgcccatgacggcagcttcgccacactcttccgagagctagacacgcggctggcggagctgaggctcactggctacgggatctccgacaccagcctcgaggagatcttcctgaaggtggtggaggagtgtgctgcggacacagatatggaggatggcagctgcgggcagcacctatgcacaggcattgctggcctagacgtaaccctgcggctcaagatgccgccacaggagacagcgctggagaacggggaaccagctgggtcagccccagagactgaccagggctctgggccagacgccgtgggccgggtacagggctgggcactgacccgccagcagctccaggccctgcttctcaagcgctttctgcttgcccgccgcagccgccgcggcctgttcgcccagatcgtgctgcctgccctctttgtgggcctggccctcgtgttcagcctcatcgtgcctcctttcgggcactacccggctctgcggctcagtcccaccatgtacggtgctcaggtgtccttcttcagtgaggacgccccaggggaccctggacgtgcccggctgctcgaggcgctgctgcaggaggcaggactggaggagcccccagtgcagcatagctcccacaggttctcggcaccagaagttcctgctgaagtggccaaggtcttggccagtggcaactggaccccagagtctccatccccagcctgccagtgtagccagcccggtgcccggcgcctgctgcccgactgcccggctgcagctggtggtccccctccgccccaggcagtgaccggctctggggaagtggttcagaacctgacaggccggaacctgtctgacttcctggtcaagacctacccgcgcctggtgcgccagggcctgaagactaagaagtgggtgaatgaggtcaggtacggaggcttctcgctggggggccgagacccaggcctgccctcgggccaagagttgggccgctcagtggaggagttgtgggcgctgctgagtcccctgcctggcggggccctcgaccgtgtcctgaaaaacctcacagcctgggctcacagcctggacgctcaggacagtctcaagatctggttcaacaacaaaggctggcactccatggtggcctttgtcaaccgagccagcaacgcaatcctccgtgctcacctgcccccaggccgggcccgccacgcccacagcatcaccacactcaaccaccccttgaacctcaccaaggagcagctgtttgaggctgcattgatggcctcctcggtggacgtcctcgtctccatctgtgtggtctttgccatgtcctttgtcccggccagcttcactcttgtcctcattgaggagcgagtcacccgagccaagcacctgcagctcatggggggcctgtcccccaccctctactggcttggcaactttctctgggacatgtgtaactacttggtgccagcatgcatcgtggtgctcatctttctggccttccagcagagggcatatgtggcccctgccaacctgcctgctctcctgctgttgctactactgtatggctggtcgatcacaccgctcatgtacccagcctccttcttcttctccgtgcccagcacagcctatgtggtgctcacctgcataaacctctttattggcatcaatggaagcatggccacctttgtgcttgagctcttctctgatcagaagctgcaggaggtgagccggatcttgaaacaggtcttccttatcttcccccacttctgcttgggccgggggcttattgacatggtgcggaaccaggccatggctgatgcctttgagcgcttgggagacaggcagttccagtcacccctgcgctgggaggtggtcggcaagaacctcttggccatggtgatacaggggcccctcttccttctcttcacactactgctgcagcaccgaagccaactcctgccacagcccagggtgaggtctctgccactcctgggagaggaggacgaggatgtagcccgtgaacgggagcgggtggtccaaggagccacccagggggatgtgttggtgctgaggaacttgaccaaggtataccgtgggcagaggatgccagctgttgaccgcttgtgcctggggattccccctggtgagtgttttgggctgctgggtgtgaatggagcagggaagacgtccacgtttcgcatggtgacgggggacacattggccagcaggggcgaggctgtgctggcaggccacagcgtggcccgggaacccagtgctgcgcacctcagcatgggatactgccctcaatccgatgccatctttgagctgctgacgggccgcgagcacctggagctgcttgcgcgcctgcgcggtgtcccggaggcccaggttgcccagaccgctggctcgggcctggcgcgtctgggactctcatggtacgcagaccggcctgcaggcacctacagcggagggaacaaacgcaagctggcgacggccctggcgctggttggggacccagccgtggtgtttctggacgagccgaccacaggcatggaccccagcgcgcggcgcttcctttggaacagccttttggccgtggtgcgggagggccgttcagtgatgctcacctcccatagcatggaggagtgtgaagcgctctgctcgcgcctagccatcatggtgaatgggcggttccgctgcctgggcagcccgcaacatctcaagggcagattcgcggcgggtcacacactgaccctgcgggtgcccgccgcaaggtcccagccggcagcggccttcgtggcggccgagttccctgggtcggagctgcgcgaggcacatggaggccgcctgcgcttccagctgccgccgggagggcgctgcgccctggcgcgcgtctttggagagctggcggtgcacggcgcagagcacggcgtggaggacttttccgtgagccagacgatgctggaggaggtattcttgtacttctccaaggaccaggggaaggacgaggacaccgaagagcagaaggaggcaggagtgggagtggaccccgcgccaggcctgcagcaccccaaacgcgtcagccagttcctcgatgaccctagcactgccgagactgtgctctga

SEQ ID NO: 22552 - DNA, 10156 bp, Homo Sapiens
gcggccgctcccccggagcggctaaagcggcggcgaccgaggcgagcaatgggcacggcagtctcggcagagcacaggcgcttcaccgcggctgctcgggctccgcgctgacctgcccgggcggccgcctattgtctttctccgcggcgaaggtgaagagttgtcccagctcggcccgcgggggagccccgggagccgcacgtgtcctgggtcatgaaacttaatccacagcaagctcccttatatggtgattgtgttgttacagtgctgcttgctgaagaggacaaagctgaagatgatgtagtgttttacttggtatttttgggttccaccctccgtcactgtacaagtactcggaaggtcagttctgatacattggagaccattgctcctggtcatgattgttgtgaaacagtgaaggtgcagctctgtgcttccaaagagggccttcccgtgtttgtggtggctgaagaagactttcatttcgtccaggatgaagcgtatgatgcagctcaattcctagcaaccagtgctggaaatcagcaggctttgaactttacccgttttcttgaccagtcaggacccccatctggggatgtgaattcccttgataagaagttggtgctggcattcaggcacctgaagctgcccacggagtggaatgtattggggacagatcagagtttgcatgatgctggcccgcgagagacattgatgcattttgctgtgcggctgggactgctgaggttgacgtggttcctgttgcagaagccaggtggccgcggagctctcagtatccacaaccaggaaggggcgacgcctgtgagcttggccttggagcgaggctatcacaagctgcaccagcttctaaccgaggagaatgctggagaaccagactcctggagcagtttatcctatgaaataccgtatggagactgttctgtgaggcatcatcgagagttggacatctatacattaacctctgagtctgattcacatcatgaacacccatttcctggagacggttgcactggaccaatttttaaacttatgaacatccaacagcaactaatgaaaacaaacctcaagcagatggacagtcttatgcccttaatgatgacagcacaggatccttccagtgccccagagacagatggccagtttcttccctgtgcaccggagcccacggaccctcagcgactttcttcttctgaagagactgagagcactcagtgctgcccagggagccctgttgcacagactgaaagtccctgtgatttgtcaagcatagttgaggaggagaatacagaccgttcctgtaggaagaaaaataaaggcgtggaaagaaaaggggaagaggtggagccagcacctattgtggactctggaactgtatctgatcaagacagctgccttcagagcttgcctgattgtggagtaaagggcacggaaggcctttcgtcctgtggaaacagaaatgaagaaactggaacaaaatcttctggaatgcccacagaccaggagtccctgagcagtggagatgctgtgcttcagagagacttggtcacggagccaggcacagcccagtattcctctggaggtgaactgggaggcatttcaacaacaaatgtcagtaccccagacactgcaggggaaatggaacatgggctcatgaacccagatgccactgttcggaagaatgtgcttcagggaggggaaagtacaaaggaaagatttgagaactctaatattggcacagctggagcctctgacgtgcacgtcacaagtaagcctgtggataaaatcagtgttccaaactgtgcccctgccgccagttccctggatggtaacaaacctgctgagtcttcacttgcatttagtaatgaagaaacctccactgaaaaaacagcagaaacggaaacttcacgaagttgtgaggagagtgctgatgctccagtagatcagaattctgtggtgattccagctgctgcaaaagacaagatttcagatggattagaaccttatactctcttagcagcaggcataggtgaggcaatgtcaccctcagatttagcccttcttgggctggaagaagatgtaatgccacaccagaactcagaaacaaattcatctcatgctcaaagccaaaagggcaaatcctcacccatttgttctacaactggagacgataaactttgtgcagactctgcatgtcaacagaacacagtgacttctagtggcgatttggttgcaaaactgtgtgataacatagttagcaagtccgaaagcaccacagcaaggcaacccagctcacaagatccacccgatgcctcccactgtgaagacccacaggctcatacagtcacctctgaccctgtaagggatacccaggaacgtgcggatttttgtcctttcaaagtggtggataacaaaggccaacgaaaagatgtgaaactagataaacctttaacaaatatgcttgaggtggtttcacatccacatccagttgtccctaaaatggagaaagaactggtgccagaccaggcagtaatatcagacagtactttctctctggcaaacagtccaggcagtgaatcagtaaccaaggatgacgcactttcttttgtcccctcccagaaagaaaagggaacagcaactcctgaactacatacagctacagattatagagatggcccagatggaaattcgaatgagcctgatacgcggccactagaagacagggcagcaggcctgtccacatcctccactgctgcagagcttcagcacgggatggggaataccagtctcacaggacttggtggagagcatgagggtcctgcccctccagcaatcccagaagctctgaatatcaaggggaacactgactcttccctgcaaagtatgggtaaggccactttggctttagattcagttttgactgaagaaggaaaacttctggtggtttcagaaagctctgcagctcaggaacaagataaggataaagcggtgacctgttcctctattaaggaaaatgctctctcttcaggaactttgcaggaagagcagagaacaccacctcctggacaagatactcaacaatttcatgaaaaatcaatctcagctgactgtgccaaggacaaagcacttcagctaagtaattcaccgggtgcatcctctgcctttcttaaggcagaaactgaacataacaaggaagtggccccacaagtctcactgctgactcaaggtggggctgcccagagcctggtgccaccaggagcaagtctggccacagagtcaaggcaggaagccttgggggcagagcacaacagctccgctctgttgccatgtctgttgccagatgggtctgatgggtccgatgctcttaactgcagtcaggcttctcctctggatgttggagtgaagaacactcaatcccagggaaaaactagtgcctgtgaggtgagtggaaatgtgacggtggatgttacaggggttaatgctctacaaggtatggctgagcccagaagagagaatatatcacacaacacccaagacatcctgattccaaacgtcttgttgagccaagagaagaatgccgttctaggtttgccagtggctctacaggacaaagctgtgactgacccacagggagttggaaccccagagatgatacctcttgattgggagaaagggaagctggagggagcagaccacagctgtaccatgggtgacgctgaggaagcccaaatagacgatgaagcacatcctgtcctactgcagcctgttgccaaggagctccccacagacatggagctctcagcccatgatgatggggccccagctggtgtgagggaagtcacgcgagccccgccttcaggcagagaaaggagcactccctctctaccttgcatggtctctgcccaggacgcacctctgcctaagggggcagacttgatagaggaggctgccagccgtatagtggatgctgtcatcgaacaagtcaaggccgctggagcactgcttactgagggggaggcctgtcacatgtcactgtccagccctgagttgggtcctctcactaaaggactagagagtgcttttacagaaaaagtgagtactttcccacctggggagagcctaccaatgggcagtactcctgaggaagccacggggagccttgcaggatgttttgctggaagggaggagccagagaagatcattttacctgtccaggggcctgagccagcagcagaaatgccagacgtgaaagctgaagatgaagtggattttagagcaagttcaatttctgaagaagtggctgtagggagcatagctgctacactgaagatgaagcaaggcccaatgacccaggcgataaaccgagaaaactggtgtacaatagagccatgccctgatgcagcatctcttctggcttccaagcagagcccagaatgtgagaacttcctggatgttggactgggcagagagtgtacctcaaaacaaggtgtacttaaaagagaatctgggagtgattctgacctctttcactcacccagtgatgacatggacagcatcatcttcccaaagccagaggaagagcatttggcctgtgatatcaccggatccagttcatccaccgatgacacggcttcactggaccgacattcttctcatggcagtgatgtgtctctctcccagattttaaagccaaacaggtcaagagatcggcaaagccttgatggattctacagccatgggatgggagctgagggtcgagaaagtgagagtgagcctgctgacccaggcgacgtggaggaggaggagatggacagtatcactgaagtgcctgcaaactgctctgtcctaaggagctccatgcgctctctttctcccttccggaggcacagctgggggcctgggaaaaatgcagccagcgatgcagaaatgaaccaccggagttcaatgcgagttcttggggatgttgtcaggagacctcccattcataggagaagtttcagtctagaaggcttgacaggaggagctggtgtcggaaacaagccatcctcatctctagaagtaagctctgcaaatgccgaagagctcagacacccattcagtggtgaggaacgggttgactctttggtgtcactttcagaagaggatctggagtcagaccagagagaacataggatgtttgatcagcagatatgtcacagatctaagcagcagggatttaattactgtacatcagccatttcctctccattgacaaaatccatctcattaatgacaatcagccatcctggattggacaattcacggcccttccacagtaccttccacaataccagtgctaatctgactgagagtataacagaagagaactataatttcctgccacatagcccctccaagaaagattctgaatggaagagtggaacaaaagtcagtcgtacattcagctacatcaagaataaaatgtctagcagcaagaagagcaaagaaaaggaaaaagaaaaagataagattaaggagaaggagaaagattctaaagacaaggagaaagataagaagactgtcaacgggcacactttcagttccattcctgttgtgggtcccatcagctgtagccagtgtatgaagcccttcaccaacaaagatgcctatacttgtgcaaattgcagtgcttttgtccacaaaggctgccgagaaagtctagcctcctgtgcaaaggtcaaaatgaagcagcccaaagggagccttcaggcacatgacacatcatcactgcccacggtcattatgagaaacaagccctcacagcccaaggagcgtcctcggtccgcagtcctcctggtggatgaaaccgctaccaccccaatatttgccaatagacgatcccagcagagtgtctcgctctccaaaagtgtctccatacagaacattactggagttggcaatgatgagaacatgtcaaacacctggaaattcctgtctcattcaacagactcactaaataaaatcagcaaggtcaatgagtcaacagaatcacttactgatgagggagtaggtacagacatgaatgaaggacaactactgggagactttgagattgagtccaaacagctggaagcagagtcttggagtcggataatagacagcaagtttctaaaacagcaaaagaaagatgtggtcaaacggcaagaagtaatatatgagttgatgcagacagagtttcatcatgtccgcactctcaagatcatgagtggtgtgtacagccaggggatgatggcggatctgctttttgagcagcagatggtagaaaagctgttcccctgtttggatgagctgatcagtatccatagccaattcttccagaggattctggagcggaagaaggagtctctggtggataaaagtgaaaagaactttctcatcaagaggataggggatgtgcttgtaaatcagttttcaggtgagaatgcagaacgtttaaagaagacatatggcaagttttgtgggcaacataaccagtctgtaaactacttcaaagacctttatgccaaggataagcgttttcaagcctttgtaaagaagaagatgagcagttcagttgttagaaggcttggaattccagagtgcatattgcttgtaactcagcggattaccaagtacccagttttattccaaagaatattgcagtgtaccaaagacaatgaagtggagcaggaagatctagcacagtccttgagcctggtgaaggatgtgattggagctgtagacagcaaagtggcaagttatgaaaagaaagtgcgtctcaatgagatttatacaaagacagatagcaagtcaatcatgaggatgaagagtggtcagatgtttgccaaggaagatttgaaacggaagaagcttgtacgtgatgggagtgtgtttctgaagaatgcagcaggaaggttgaaagaggttcaagcagttcttctcactgacattttagttttccttcaagaaaaagaccagaagtacatctttgcatcattggaccagaagtcaacagtgatctctttaaagaagctgattgtgagagaagtggcacatgaggagaaaggtttattcctgatcagcatggggatgacagatccagagatggtagaagtccatgccagctccaaagaggaacgaaacagctggattcagatcattcaggacacaatcaacaccctgaacagagatgaagatgaaggaattcctagtgagaatgaggaagaaaagaaaatgttggacaccagagcccgagaattaaaagaacaacttcaccagaaggaccaaaaaatcctactcttgttggaagagaaggagatgattttccgggacatggctgagtgcagcacccctctcccagaggattgctccccaacacatagccctagagttctcttccgctccaacacagaagaggctctcaaaggaggacctttaatgaaaagtgcaataaatgaggtggagatccttcagggtttggtgagtggaaatctgggaggcacacttgggccgactgtcagcagccccattgagcaagatgtggtcggtcccgtttccctgccccggagagcagagacctttggaggatttgacagccatcagatgaatgcttcaaaaggaggcgagaaggaagagggagatgatggccaagatcttaggagaacggaatcagatagtggcctaaaaaagggtggaaatgctaacctggtatttatgcttaaaagaaacagtgagcaggttgtccagagcgttgttcatctctacgagctcctcagcgctctgcagggtgtggtgctgcagcaggacagctacattgaggaccagaaactggtgctgagcgagagggcgctcactcgcagcttgtcccgcccgagctccctcattgagcaggagaagcagcgcagcctggagaagcagcgccaggacctggccaacctgcagaagcagcaggcccagtacctcgaggagaagcgcaggcgcgagcgtgagtgggaagctcgtgagagggagctgcgggagcgggaggccctcctggcccagcgcgaggaggaggtgcagcaggggcagcaggacctggaaaaggagcgggaggagctccagcagaagaagggcacataccagtatgacctggagcgactgcgtgctgcccagaaacagcttgagagggaacaggagcacgtgcgccgggaggcagagcggctcagccagcggcagacagaacgggacctgtgtcaggtttcccatccacataccaagctgatgaggatcccatcgttcttccccagtcctgaggagcccccctcgccatctgcaccttccatagccaaatcagggtcattggactcagaactttcagtgtccccaaaaaggaacagcatctctcggacacacaaagataaggggccttttcacatactgagttcaaccagccagacaaacaaaggaccagaagggcagagccaggcccctgcgtccacctctgcctctacccgcctgtttgggttaacaaagccaaaggaaaagaaggagaaaaaaaagaagaacaaaaccagccgctctcagcccggtgatggtcccgcgtcagaagtatcagcagagggtgaagagatcttctgctgactctcttcctctctgctgaggcagctgcctcctgatcctggccagcccacctctcctgctgtccccgcgtgcacaagtctcttacactggacgcccactgctcctcagcgtccagtcctcctgggcggccccaggtcctggacaataagcaacagatgatattgagtgtcgggtggggaaggaggcccagactctgcttcggccatgatttgtgactgcccaggactctcaggttgggctggccctactcaggattacactgaaagtaatggcctcgtaagtacaggtgatggttttggacacgtcaggaattcctaaaggctgaaagagtgtatccaagtaaggtctgaacctccgactgccttttatttgggggaacacaaaaccaaacagcagatgttttggacttgatctgtgtacgtacatggggacctgtctgcatatacacacggggaatgccagaagaaggcccagtctgcaccaggcgtctggtcaacttagcacaagggcagtgcctggacggacccggagcccccgcatatcagcagttcacccagtactcctcagagactggtttccctctaaacccatcccgggcacataccacccctgttttgcatgtatttctcatttcattttagggatgacaaacatttgtgaaaccagtgagagaagtcttgatgtgtataaaagacgtgatgtgcaccacctcgatctcggtgtttcaggcactaaagcaacaaaacaacccatagtatctcattttgtcatcagatccagaagaaatatcctggttttccagcatgtttacccacatgttttgggcatggataaagtgaagaggcctactcaccattatccctgcagcgtgacaccttttgattgtcactgaccactcagaaggggccacggcctcctggctgtgttcctgagcccccgtcgtgcctctcccagacagcagctgtctggcccttgctgggtgagggcacaccactgccaggggtcagcctcgcacccaggccaggcagaagctgtgctctgaagctaggacagctggctgagaagtgggttcaggcgaagggtgaagccatgtgtagcagttcctgccagtgcagatctggagaggagctggcccggaaggcgtggttgtgaaagcgcccttcttatgttaggaggccttggcaaaattggatttcttcaaaaatacatgtaaaggtctgttgttgaattgtactctgcccctggaagcagatacagatggctgcctgctgctcggctttgcttttgcttttcccaccgtgttttcatctttgttcacttgaggctttccccagctggtgtgtgcaggacagttcatggtaatgttgccctctgaggccccgtacaccagaagggaggccctggaaaattttgtgcttccagcgtggccttcaattcttgcttttttgcccctcagaagcatggggcttttgagcacacttaaaaaaaaaaaccggaattc

SEQ ID NO: 22553 - DNA, 6786 bp, Homo Sapiens
atggcttgttggcctcagctgaggttgctgctgtggaagaacctcactttcagaagaagacaaacatgtcagctgctgctggaagtggcctggcctctatttatcttcctgatcctgatctctgttcggctgagctacccaccctatgaacaacatgaatgccattttccaaataaagccatgccctctgcaggaacacttccttgggttcaggggattatctgtaatgccaacaacccctgtttccgttacccgactcctggggaggctcccggagttgttggaaactttaacaaatccattgtggctcgcctgttctcagatgctcggaggcttcttttatacagccagaaagacaccagcatgaaggacatgcgcaaagttctgagaacattacagcagatcaagaaatccagctcaaacttgaagcttcaagatttcctggtggacaatgaaaccttctctgggttcctgtatcacaacctctctctcccaaagtctactgtggacaagatgctgagggctgatgtcattctccacaaggtatttttgcaaggctaccagttacatttgacaagtctgtgcaatggatcaaaatcagaagagatgattcaacttggtgaccaagaagtttctgagctttgtggcctaccaagggagaaactggctgcagcagagcgagtacttcgttccaacatggacatcctgaagccaatcctgagaacactaaactctacatctcccttcccgagcaaggagctggctgaagccacaaaaacattgctgcatagtcttgggactctggcccaggagctgttcagcatgagaagctggagtgacatgcgacaggaggtgatgtttctgaccaatgtgaacagctccagctcctccacccaaatctaccaggctgtgtctcgtattgtctgcgggcatcccgagggaggggggctgaagatcaagtctctcaactggtatgaggacaacaactacaaagccctctttggaggcaatggcactgaggaagatgctgaaaccttctatgacaactctacaactccttactgcaatgatttgatgaagaatttggagtctagtcctctttcccgcattatctggaaagctctgaagccgctgctcgttgggaagatcctgtatacacctgacactccagccacaaggcaggtcatggctgaggtgaacaagaccttccaggaactggctgtgttccatgatctggaaggcatgtgggaggaactcagccccaagatctggaccttcatggagaacagccaagaaatggaccttgtccggatgctgttggacagcagggacaatgaccacttttgggaacagcagttggatggcttagattggacagcccaagacatcgtggcgtttttggccaagcacccagaggatgtccagtccagtaatggttctgtgtacacctggagagaagctttcaacgagactaaccaggcaatccggaccatatctcgcttcatggagtgtgtcaacctgaacaagctagaacccatagcaacagaagtctggctcatcaacaagtccatggagctgctggatgagaggaagttctgggctggtattgtgttcactggaattactccaggcagcattgagctgccccatcatgtcaagtacaagatccgaatggacattgacaatgtggagaggacaaataaaatcaaggatgggtactgggaccctggtcctcgagctgacccctttgaggacatgcggtacgtctgggggggcttcgcctacttgcaggatgtggtggagcaggcaatcatcagggtgctgacgggcaccgagaagaaaactggtgtctatatgcaacagatgccctatccctgttacgttgatgacatctttctgcgggtgatgagccggtcaatgcccctcttcatgacgctggcctggatttactcagtggctgtgatcatcaagggcatcgtgtatgagaaggaggcacggctgaaagagaccatgcggatcatgggcctggacaacagcatcctctggtttagctggttcattagtagcctcattcctcttcttgtgagcgctggcctgctagtggtcatcctgaagttaggaaacctgctgccctacagtgatcccagcgtggtgtttgtcttcctgtccgtgtttgctgtggtgacaatcctgcagtgcttcctgattagcacactcttctccagagccaacctggcagcagcctgtgggggcatcatctacttcacgctgtacctgccctacgtcctgtgtgtggcatggcaggactacgtgggcttcacactcaagatcttcgctagcctgctgtctcctgtggcttttgggtttggctgtgagtactttgccctttttgaggagcagggcattggagtgcagtgggacaacctgtttgagagtcctgtggaggaagatggcttcaatctcaccacttcggtctccatgatgctgtttgacaccttcctctatggggtgatgacctggtacattgaggctgtctttccaggccagtacggaattcccaggccctggtattttccttgcaccaagtcctactggtttggcgaggaaagtgatgagaagagccaccctggttccaaccagaagagaatatcagaaatctgcatggaggaggaacccacccacttgaagctgggcgtgtccattcagaacctggtaaaagtctaccgagatgggatgaaggtggctgtcgatggcctggcactgaatttttatgagggccagatcacctccttcctgggccacaatggagcggggaagacgaccaccatgtcaatcctgaccgggttgttccccccgacctcgggcaccgcctacatcctgggaaaagacattcgctctgagatgagcaccatccggcagaacctgggggtctgtccccagcataacgtgctgtttgacatgctgactgtcgaagaacacatctggttctatgcccgcttgaaagggctctctgagaagcacgtgaaggcggagatggagcagatggccctggatgttggtttgccatcaagcaagctgaaaagcaaaacaagccagctgtcaggtggaatgcagagaaagctatctgtggccttggcctttgtcgggggatctaaggttgtcattctggatgaacccacagctggtgtggacccttactcccgcaggggaatatgggagctgctgctgaaataccgacaaggccgcaccattattctctctacacaccacatggatgaagcggacgtcctgggggacaggattgccatcatctcccatgggaagctgtgctgtgtgggctcctccctgtttctgaagaaccagctgggaacaggctactacctgaccttggtcaagaaagatgtggaatcctccctcagttcctgcagaaacagtagtagcactgtgtcatacctgaaaaaggaggacagtgtttctcagagcagttctgatgctggcctgggcagcgaccatgagagtgacacgctgaccatcgatgtctctgctatctccaacctcatcaggaagcatgtgtctgaagcccggctggtggaagacatagggcatgagctgacctatgtgctgccatatgaagctgctaaggagggagcctttgtggaactctttcatgagattgatgaccggctctcagacctgggcatttctagttatggcatctcagagacgaccctggaagaaatattcctcaaggtggccgaagagagtggggtggatgctgagacctcagatggtaccttgccagcaagacgaaacaggcgggccttcggggacaagcagagctgtcttcgcccgttcactgaagatgatgctgctgatccaaatgattctgacatagacccagaatccagagagacagacttgctcagtgggatggatggcaaagggtcctaccaggtgaaaggctggaaacttacacagcaacagtttgtggcccttttgtggaagagactgctaattgccagacggagtcggaaaggattttttgctcagattgtcttgccagctgtgtttgtctgcattgcccttgtgttcagcctgatcgtgccaccctttggcaagtaccccagcctggaacttcagccctggatgtacaacgaacagtacacatttgtcagcaatgatgctcctgaggacacgggaaccctggaactcttaaacgccctcaccaaagaccctggcttcgggacccgctgtatggaaggaaacccaatcccagacacgccctgccaggcaggggaggaagagtggaccactgccccagttccccagaccatcatggacctcttccagaatgggaactggacaatgcagaacccttcacctgcatgccagtgtagcagcgacaaaatcaagaagatgctgcctgtgtgtcccccaggggcaggggggctgcctcctccacaaagaaaacaaaacactgcagatatccttcaggacctgacaggaagaaacatttcggattatctggtgaagacgtatgtgcagatcatagccaaaagcttaaagaacaagatctgggtgaatgagtttaggtatggcggcttttccctgggtgtcagtaatactcaagcacttcctccgagtcaagaagttaatgatgccatcaaacaaatgaagaaacacctaaagctggccaaggacagttctgcagatcgatttctcaacagcttgggaagatttatgacaggactggacaccaaaaataatgtcaaggtgtggttcaataacaagggctggcatgcaatcagctctttcctgaatgtcatcaacaatgccattctccgggccaacctgcaaaagggagagaaccctagccattatggaattactgctttcaatcatcccctgaatctcaccaagcagcagctctcagaggtggctctgatgaccacatcagtggatgtccttgtgtccatctgtgtcatctttgcaatgtccttcgtcccagccagctttgtcgtattcctgatccaggagcgggtcagcaaagcaaaacacctgcagttcatcagtggagtgaagcctgtcatctactggctctctaattttgtctgggatatgtgcaattacgttgtccctgccacactggtcattatcatcttcatctgcttccagcagaagtcctatgtgtcctccaccaatctgcctgtgctagcccttctacttttgctgtatgggtggtcaatcacacctctcatgtacccagcctcctttgtgttcaagatccccagcacagcctatgtggtgctcaccagcgtgaacctcttcattggcattaatggcagcgtggccacctttgtgctggagctgttcaccgacaataagctgaataatatcaatgatatcctgaagtccgtgttcttgatcttcccacatttttgcctgggacgagggctcatcgacatggtgaaaaaccaggcaatggctgatgccctggaaaggtttggggagaatcgctttgtgtcaccattatcttgggacttggtgggacgaaacctcttcgccatggccgtggaaggggtggtgttcttcctcattactgttctgatccagtacagattcttcatcaggcccagacctgtaaatgcaaagctatctcctctgaatgatgaagatgaagatgtgaggcgggaaagacagagaattcttgatggtggaggccagaatgacatcttagaaatcaaggagttgacgaagatatatagaaggaagcggaagcctgctgttgacaggatttgcgtgggcattcctcctggtgagtgctttgggctcctgggagttaatggggctggaaaatcatcaactttcaagatgttaacaggagataccactgttaccagaggagatgctttccttaacaaaaatagtatcttatcaaacatccatgaagtacatcagaacatgggctactgccctcagtttgatgccatcacagagctgttgactgggagagaacacgtggagttctttgcccttttgagaggagtcccagagaaagaagttggcaaggttggtgagtgggcgattcggaaactgggcctcgtgaagtatggagaaaaatatgctggtaactatagtggaggcaacaaacgcaagctctctacagccatggctttgatcggcgggcctcctgtggtgtttctggatgaacccaccacaggcatggatcccaaagcccggcggttcttgtggaattgtgccctaagtgttgtcaaggaggggagatcagtagtgcttacatctcatagtatggaagagtgtgaagctctttgcactaggatggcaatcatggtcaatggaaggttcaggtgccttggcagtgtccagcatctaaaaaataggtttggagatggttatacaatagttgtacgaatagcagggtccaacccggacctgaagcctgtccaggatttctttggacttgcatttcctggaagtgttctaaaagagaaacaccggaacatgctacaataccagcttccatcttcattatcttctctggccaggatattcagcatcctctcccagagcaaaaagcgactccacatagaagactactctgtttctcagacaacacttgaccaagtatttgtgaactttgccaaggaccaaagtgatgatgaccacttaaaagacctctcattacacaaaaaccagacagtagtggacgttgcagttctcacatcttttctacaggatgagaaagtgaaagaaagctatgtatga

SEQ ID NO: 22554 - DNA, 5180 bp, Homo Sapiens
ggcacgaggtgagccgcaggcttcgggaggcgagggggcggggggagcagcgccgaggccgccgcctccgcctccgccgcctaggactagggggtgggggacggacaagccccgatgccgggggagacggaagagccgagacccccggagcagcaggaccaggaagggggagaggcggccaaggcggctccggaggagccccaacaacggccccctgaggcggtcgcggcggcgcctgcagggaccactagcagccgcgtgctgaggggaggtcgggaccgaggccgggccgctgcggccgccgccgccgcagctgtgtcccgccggaggaaggccgagtatccccgccggcggaggagcagccccagcgccaggcctcccgacgtccccgggcagcagccccaggccgcgaagtccccgtctccagttcagggcaagaagagtccgcgactcctatgcatagaaaaagtaacaactgataaagatcccaaggaagaaaaagaggaagaagacgattctgccctccctcaggaagtttccattgctgcatctagacctagccggggctggcgtagtagtaggacatctgtttctcgccatcgtgatacagagaacacccgaagctctcggtccaagaccggttcattgcagctcatttgcaagtcagaaccaaatacagaccaacttgattatgatgttggagaagagcatcagtctccaggtggcattagtagtgaagaggaagaggaggaggaagaagagatgttaatcagtgaagaggagataccattcaaagatgatccaagagatgagacctacaaaccccacttagaaagggaaaccccaaagccacggagaaaatcagggaaggtaaaagaagagaaggagaagaaggaaattaaagtggaagtagaggtggaggtgaaagaagaggagaatgaaattagagaggatgaggaacctccaaggaagagaggaagaagacgaaaagatgacaaaagtccacgtttacccaaaaggagaaaaaagcctccaatccagtatgtccgttgtgagatggaaggatgtggaactgtccttgcccatcctcgctatttgcagcaccacattaaataccagcatttgctgaagaagaaatatgtatgtccccatccctcctgtggacgactcttcaggcttcagaagcaacttctgcgacatgccaaacatcatacagatcaaagggattatatctgtgaatattgtgctcgggccttcaagagttcccacaatctggcagtgcaccggatgattcacactggcgagaagccattacaatgtgagatctgtggatttacttgtcgacaaaaggcatctcttaattggcacatgaagaaacatgatgcagactccttctaccagttttcttgcaatatctgtggcaaaaaatttgagaagaaggacagcgtagtggcacacaaggcaaaaagccaccctgaggtgctgattgcagaagctctggctgccaatgcaggcgccctcatcaccagcacagatatcttgggcactaacccagagtccctgacgcagccttcagatggtcagggtcttcctcttcttcctgagcccttgggaaactcaacctctggagagtgcctactgttagaagctgaagggatgtcaaagtcatactgcagtgggacggaacgggtgagcctgatggctgatgggaagatctttgtgggaagcggcagcagtggaggcactgaagggctggttatgaactcagatatactcggtgctaccacagaggttctgattgaagattcagactctgccggaccttagtggacaggaagacttggggcatgggacagctcagactttgtatttaaaagttaaaaaggacaaaaaaaaaatctaaagcatttaaaatctagtgaaataactgaagggcctgctctttccattgtggatcacagcacacacatacatacaccctccacctccccatcccctgttctccctctgttgctccccttataaaattgatgttgtctttaccagaaaggtagacaaaaaagaagcagcagcagctcttaaagtgagggttattctcatactcggttccagccatcagcagacttcctgctcatcggcagatccccctttccaacctgtaactctgatgtgctctggatcagcttttaacttttaatcatatattactgtcttctaaatcccttctcctcctctactgctgccctatggttctggctcctaccccctgcggcacacttatcttcaaataccatagaattctaatctctggaggctggcagcttgacttggcactttagggccccttagcagggtgagctgttaaaacagcacacatctctcatcccctcttcctttattcccccctgggtttcagaaaggaaggatatatggggaccacctcccccttctttgatcccagcatctcagtccccctcccaaccctccatatggctctcaatggtgctcacttgcttggaagcaggctcccaatagggagggggctgccctctacagtctctttgactgtaagacagggctctgtatcagtgagacgatgagaaaagtcccaggctaatggcagaaatttgcactttgaacatgtgtgtttttgtgttgtggaacctgagattccttatttattaacaggaagtctgattttttttttttggagtctttgttgctatattttgtggggctgggagagagagattagattattttgacatgggatcccttccataacaggtactttgaaggcaagacatagggttgaagaagcacagccagcctctgaaatcatagctctccagtggcttttaaagaaagctggtcctcagcactaacaaaatcactacaatagcctagtgcttttttggaagcctttttagggaagaatgttaggttcatggtaactagtatgctctttgagatttttacagtgttgaaacttaagaattttgagagggtgaggagggttgttcagaatctaaattacagatagatgattgtttcttgtgaatttgtttcttttcctttttttttgtccctaccatttccttacatttcccttggggcccatctctggctccttgctttttgtttcttgctttgctttatcagttcattccagctccctgttagtgaaggacactgctgttagtgaaggaacaaagtctatgagtcctaaaattttaagtcaaagaaaactgctctgtttcccctttagtaacacttctgaagaggaaaaacttcaatgagccaaagttaataatcctatataataattgctttggctttcacctaaaattctgggcatcacaatttccttgggatagaggttgtgttggggaatagattgcttattgctgttcactggagagaaaaggtagtgtttttgtacaaggtcataccgccagaagccccaaatcctattttggctcatcttcaggtaaagagtaattcctatcctgtgtgcctcagaagctagaatcgaaggcttaccctattcattgtttattgtcagaaatgcatgatggctcttggaaagaatgacgttttgctggaaaaaaaaaaaagaacagtttgtgtttcacaaacatggcttatcaattttttcaaagaattcttttttcccaaaaagaggagtaacaaaatgtcatttctgaaagaggcttactttataccaactagtgtcagcatttgggatgccagggaacagagagtgagacacctacaatcaccagtctcaaatgcgctattgtttcttttcagagtgttgcagatttgccatttctccataatatggggatagaaaatggaataaagatagaagggatgtagaatatgctttcctgccaacatggtttggagtcgactttggtatattgactagatttgaaaatacaagattgattagatgaatctacaaaaaagttgtcctcctctcaggtcccttttacactttttgactaactagcatctatattccacacttagcttttttgtcacacttatcctttgtctccgtaaatttcatttgcagtggttagtcatcagatattttagccacctacacaaaagcaaactgcatttttaaaaatctttctgagatgggagaaaatgtattctcctttcctataccgctctcccaacaaaaaaacaactagttagttctactaattagaaacttgctgtactttttcttttcttttaggggtcaaggaccctctttatagctaccatttgcctacaataaattattgcagcagtttgcaatactaaaatattttttatagactttatatttttccttttgataaagggatgctgcatagtagagttggtgtaattaaactatctcagccgtttccctgctttcccttctgctccatatgcctcattgtccttccagggagctcttttaatcttaaagttctacatttcatgctcttagtcaaattctgttacctttttaataactcttcccactgcatatttccatcttgaattggtggttctaaattctgaaactgtagttgagatacagctatttaatatttctgggagatgtgcatccctcttctttgtggttgcccaaggttgttttgcgtaactgagactccttgatatgcttcagagaatttaggcaaacactggccatggccgtgggagtactgggagtaaaataaaaatatcgaggtatagactagcatccacatagagcacttgaacctcctttgtacctgtttggggaaaaagtataatgagtgtactaccaatctaactaagattattatagtctggttgtttgaaataccatttttttctccttttgtgtttttcccactttccaatgtactcaagaaaattgaacaaatgtaatggatcaatttaaaatattttatttcttaaaagccttttttgcctgttgtaatgtgcaggacccttctcctttcatgggagagacaggtagttacctgaatataggttgaaaaggttatgtaaaaagaaattataataaaagggatactttgcttttcaaatctttgttttctcttattctaggtaaggcatattaaaaataaatatgtaaagaagaaaaataaaagttgtcttcatggaaaaaaaaaaaaaaaaaa

SEQ ID NO: 22555 - DNA, 3071 bp, Homo Sapiens
gaattcgcggccgctcgacgctcagcagagctaccagctgccctgttggcttcgctggtcggatcgtcctcctggccccgccaaacaggcgagcggccccgactgtggggcatggcagtagtctcctcgttctccgccgccgctagcctagctgagtcgccggcttctgcgctaggggctcccaccgcctccgcaggctaaggagccgctgccaccaacgagctgtgagggttactatgctccctctttgccgccgtctcctcctcttgcccgcgcaggcacccctctggctgctcagtcctgcctcagtgtcaaaccagaagagaagtaaaattcaacaaaaatttatgtgtggagttccttcttaaaagaagaaaaaagtgattatttagactatggatcggagcaaacggaattcaattgcaggatttcctccacgtgtggagcgtcttgaagagtttgaaggaggtggtggaggagaaggaaatgtgagccaggtgggaagagtttggccatcttcgtatcgagctcttataagtgccttttccagactgacgcgtttggatgatttcacctgtgaaaaaatagggtctggcttcttttctgaagtgttcaaggtacgacaccgagcttctggtcaggtgatggctcttaagatgaacacattgagcagtaaccgggcaaacatgctgaaagaagtacagctcatgaatagactctcccatcccaacatccttaggttcatgggtgtatgtgttcatcaaggacaattgcatgcacttacagagtatatcaactccgggaacctggaacagttgctagacagtaacctgcatttgccttggactgtgagggtaaaactggcctatgacatagcagtgggcctcagctaccttcacttcaaaggcatttttcatcgggacctcacatctaagaactgcctgataaagagggatgagaatggttactctgcagtggtagctgactttggcctggctgagaagatccccgatgtcagcatggggagtgagaagctggccgtggtgggttccccattctggatggcacctgaggttctccgagatgagccctataatgaaaaggcagatgtgttctcttatggtatcatcctctgcgagatcatcgcccgcatccaggccgatccggactatcttccccgcacagagaatttcgggctggactatgatgctttccagcacatggtgggagactgtcccccagattttctgcaacttactttcaactgctgtaacatggatcccaaactgcgcccatcttttgtggagattgggaagaccctggaggaaattctgagccgcctacaggaagaagagcaggagagggataggaagctgcagcccacagccaggggactcttggagaaagcacctggggtgaagcgactaagctcactggatgacaagatcccccacaagtcaccatgcccaagacgtaccatctggctgtctcgaagccagtcagatatcttttcccgtaagcccccacgtacagtgagtgtcttggacccatactaccggccacgagatggtgctgcccgcacccccaaagtcaacccttttagtgctcgccaggacctcatggggggcaagatcaagttttttgacctgcccagcaagtctgtcatctctctggtatttgacctggatgcaccagggcccggaactatgcccctggctgactggcaggagcccctggccccacctattcgccggtggcgttccttgcctggttcgcctgagttcttgcatcaagaggcttgtccatttgtgggccgggaagaatcgctatctgatgggcccccaccacgcctaagtagtctcaagtacagagttaaagagatcccaccattccgggcatctgccctaccagctgctcaagcccatgaggctatggactgctccattctccaggaagaaaatggttttgggtccaggccccaggggaccagtccatgccctgcgggtgcttctgaggagatggaggtagaagaaaggccagcaggctcaactccagccaccttctccacctcaggcataggcctgcaaacccagggaaagcaggatgggtgagggggtttagtccctgcctcaccttggggatggaccttcagctgaaaccatatggccccctaggtgcacagccttgattcttccctggagcctacagagcaggcaggctaggccaagccaggctcaacttctgggctcccagtgcccattggctgtgtatgacgggaggcagcagtgagaggccttcctagttagggccaacagctgataccaagcctctgaaatccagcaaggaggtctgcctcccaccagaccctctccagtgtacttccccagataggaccagaggatgtctagttctaggctgagctggcaggcagctattaccccggttctttccccaccccaggtctgtctcttgccttttcttggggcatataagctactgagtggaacatggagctgatcaagaggccgtaatggtcatggctgtttccagacctgaatattgggtgcttcttgccagtattctaagacatttgagtaattgctgtttgcacttactgcatggtcagaccacgtcactacatttctatgcaaggggacagcaaggcagcgtggtggtcatggctcttagctaacctattcaaagaccttttcctgttgattaatctattttcatatttataaaggagtcttaatgttctgccccataagactttcaaccttgtggttgggagtggggctggttttgtaggccctagggcctgcttctatgtatttatcaacatgtgatacattcaattggttaaatggtttatacagggactgatttgcttcccttcctgccatggctggagctttgggaacagtctgtccttacagagctgcaataagaaataaccaaagatgaagctggtcaaatattttcataacttgcttctgttgattttttttttgtaaaactttcccaagacattttcagacttaaaaataaagtcagtgttacaggtaaaaaaa

SEQ ID NO: 22556 - DNA, 4101 bp, Homo Sapiens
agagtggacagcaattgtgaagatcgccagagagttctgtgtttcatcaccgccgaaaggttaaaaaataaatcatgactgaatctgcctctagcacaagtggtcaagagtttgatgtgttcagtgttatggactggaaagatggagtgggcacgttaccaggaagtgacttaaagtttcgggtaaatgagtttggagccctggaagttattacagatgagaatgagatggaaaatgttaaaaaagcaactgctaccaccacttggatggtaccaactgctcaagaagccccgacctctcccccgagctccaggcccgtatttccacctgcctactggacatctccacctggatgtcccacagtcttttcagagaagactgggatgcctttcaggttgaaggatccagtgaaagtagaagggcttcagttctgtgagaactgttgtcagtatggcaacgtagatgagtgtctttctggaggaaactattgcagccagaattgtgctcggcacatcaaagataaagatcagaaggaagaaagggacgtagaagaagacaatgaggaagaagatcctaagtgtagtcggaagaaaaaaccaaaattatctctgaaagctgacaacaaggaggatggagaagagagagatgatgaaatggagaacaaacaagatgtaagaatcctgaggggttcgcagagagcacggaggaaaagacgaggggattcggctgtactaaagcagggtttgcctcctaaaggaaagaaagcgtggtgctgggcatcctacctggaagaggagaaagcggtggcagtgccggcgaagctgttcaaggagcatcaatcctttccatataacaaaaatggattcaaagttggcatgaaattagaaggcgtggatcccgagcatcagtctgtgtactgtgtcctcaccgtcgcggaggtttgtggataccggataaagcttcactttgatgggtattctgattgctatgacttctgggtgaatgcagacgctctggatatccacccagttgggtggtgtgagaaaaccggccacaaactccatcctccaaaagggtataaagaagaagaattcaattggcagacctatcttaagacatgtaaagctcaagctgctcctaagtcattatttgaaaatcagaatataacagtgatcccatcgggctttcgagttggtatgaagcttgaggcagtagacaaaaagaatccctcattcatctgtgttgctacggtaacagatatggtggacaatcgtttcctggtacattttgacaactgggatgagagctatgactattggtgtgaagcatcaagtccacatattcatccagttggttggtgtaaggaacatagaagaacccttattactccaccaggttatccaaatgtgaaacatttttcttgggataaatacttagaagaaaccaattctttacctgctcctgcaagagctttcaaagtgaaacctcctcatggattccagaaaaaaatgaagcttgaggttgtagacaaaaggaaccctatgtttattagagtagcaactgtggcagacacagatgatcaccgggtaaaagttcactttgatggctggaacaattgctatgattactggatagatgcagattctcctgatattcaccctgtaggctggtgttcaaaaacaggacatccccttcagcctcctttgagccccttagaattaatggaagcttcagaacatggtggatgctcaaccccgggatgtaaagggattggccatttcaagagagcgagacatctgggccctcacagtgctgccaactgtccctattcagaaatcaatttgaataaagaccgtatttttccagaccgcttaagtggtgagatgcctccggctagtccgtcatttccaagaaataaaaggacagatgcaaatgaaagctcttcttcccctgaaatcagagaccagcatgctgatgatgtcaaagaagactttgaagagagaacagaaagtgaaatgagaacatcacatgaagccagaggtgcccgggaagaacccaccgtccagcaggcacagcgtcggtcagctgtctttctgtcctttaagtccccaattccatgtctgcccttgcgctgggagcagcaaagcaaacttcttccaactgtcgcaggaatccctgccagtaaagtttccaaatggagcacagacgaggtgtcagaatttatacagagcttacctgggtgtgaagaacatggaaaggtatttaaagatgaacaaattgatggagaagcatttctacttatgactcaaacagacattgttaaaattatgagcattaaactgggccctgctctcaaaattttcaattccatcctgatgttcaaagctgcagagaagaattctcacaatgaactttgaagatggtgaattctgaataccatcagcattctgctttaaagctcatgttttattcaaagcacaaggacggttataactcctaagtgagaagtctccaaaactcaaaagagcaacactatcggattatttatattactcaagagacaatatatatgaattcttatgaaagtgcttgagcttttaaccaggtactgtctaacaacagtcatcttttggttctgttcactgagctaaatttatctttgtaaatctttttgagtctggggggtggggggaaggggggcttcattaattatttatggtaatggggggcagagtaagaacttttggcattttgtaaacattgttgaattctctttcatgtacactgtttctttttcaatactttcagaaacctttttatataatcaaatttcaatttaaaccaaattagtcgaaacctggctaagtttagccagtaggactgttatctgtattgttaattttgtgccatattttgaattgcaacattatgctaagtataactttgcaagtcatgatattgcctaactgcttgtcataattgtcagggctgaatagttgtaagaatgacttttctttgaatcagtatttttccttttgcacgcattatgaaatgttaaacaaattacttttcaccagcatctttactataattaccaaaaacatgtatataaaagaatgaaattgaaaaataaaatatataaacataaataaattaggtagtgtattttgagtggcatcagtctcactcatcttggtgccccggtgtttacaagagccagatggtgtcagaggagtacgcagttgtatgcagttatggttggggggaatgtttgtgagggtcttgaactatttatgagatgatcttgagcttctaattttcattgatgaaattgtggtggtttacagagactaagagctcattctgtcaacagaaacactaatctgtacagagcgctgtctcaggtcatgcattgtcctccaaacccaaaggtttttttcagggttggctagagagcgagtattgtgattttgctgaaaagacaaggtgtgaaggagcaacttcagttgacacaaaatttgaaatgctcacagatcagggaggtgatttcccaaagtaattgcccaagaacctccgttttggaaggattcctttttctgtagaatactttgcctcgatatataagcatacagatgcactttaaatgaaaacccttgattataaattgatagctggtagtgtttcttttgcaagaatgcatttctaaggcaaaaggtaaattattttgtccgtcttttgatgtactttctgattccaggattggatatttattcaaggactattttaaaaatagaaagtaagtttgtagcatgctgtctgaattctggggtaagttccacctcttctttagttgctttcgttttttatgatgtaggacttcctttgatatccctgttggaagtccattagcagtcctttgcatttgccaattcaaggtaaaacagggtcagtgacatctgcagtgtcccagtcatttatttgcatgaatctgcttaaataagttttttgttgctgttttttcttttttatgttttgttcagaatttgtacattcaagttgtacttgttatatctgacatgaatgaaataaaatcttaattac

SEQ ID NO: 22557 - DNA, 4007 bp, Homo Sapiens
taattttctcattgttttcatgttttgagtaaggtagtttcacaactgatatgattcatttagcttttttaacaaagccaatattggttaatatgattgttgtggttaatatggttaataatgttctttttagtgacttcagatgaaagcaataaaacttggggaaggaacacagtctttcgacaagaagaatttgaggatgtaaaaaggaattttaagaaaaaaggttgtacctggggaccaaattccattcaaatgaaagatagaacagattgcaaagaaaggataagacctctctccgatggcaacagtccttggtcaactatcttaataaaaaatcagaaaaccatgcccttggcttcattgtttgtggaccagccagggtcctgtgaagagccaaaactttcccctgatggattagaacacagaaaaccaaaacaaataaaattgcctagtcaggcctacattgatctacctcttgggaaagatgctcagagagagaatcctgcagaagctgaaagctgggaggaggcagcctctgcgaatgctgccacagtctccattgagatgactcctacgaatagtctgagtagatccccccagagaaagaaaacggagtcagctctgtatgggtgcaccgtccttctggcatcggtggctctgggactggacctcagagagcttcataaagcacaggctgctgaagaaccgttgcccaaggaagagaagaagaaacgagagggaatcttccagcgggcttccaagtcccgcagaagcgccagtcctcccacaagcctgccatccacctgtggggaggccagcagcccaccctccctgccactgtcaagtgccctgggcatcctctccacaccttctttctccacaaagtgcctgctgcagatggacagtgaagatccactggtggacagtgcacctgtcacttgtgactctgagatgctcactccggatttttgtcccactgccccaggaagtggtcgtgagccagccctcatgccaagacttgacactgattgtagtgtatcaagaaacttgccgtcttccttcctacagcagacatgtgggaatgtaccttactgtgcttcttcaaaacatagaccatcacatcacagacggaccatgtctgatggaaatccgaccccaactggtgcaactattatctcagccactggagcctctgcactgccactctgcccctcacctgctcctcacagtcatctgccaagggaggtctcacccaagaagcacagcactgtccacatcgtgcctcagcgtcgccctgcctccctgagaagccgctcagatctgcctcaggcttacccacagacagcagtgtctcagctggcacagactgcctgtgtagtgggtcgcccaggaccacatcccacccaattcctcgctgccaaggagagaactaaatcccatgtgccttcattactggatgctgacgtggaaggtcagagcagggactacactgtgccactgtgcagaatgaggagcaaaaccagccggccatctatatatgaactggagaaagaattcctgtcttaaactaagtgccttactgttgtttaagcatttttttaaggtgaacaaatgaacacaatgtatctacctttgaactgtttcatgctgctgtgttttcaaaagctgtggccatgttcctaaattagtaagatatatccagcttctcaaaaaatgtatatgattgctgttagccatgtctattgtttttcctctggattcttttcttataacttggaatacacaaaagtataaaacaagagatgtgcaccaatgaaaactatgctgggtcgaattaccttcagcacaatgttaatgttttcgttctcatttatgcctttgtccatttgcacacaacagaaattgtaatgagcttcactatttttgtttctttccttccttttttttcttttttcctttctttcctttttcttgtcttgtttcttgtttttttttcttgtagtttcttttcttaattgtcatttttgcaacaaaaagccaagaaagagctttagtttcttggcaagaataatgtgatattagtaagtaaaggttcttaaaagtctgatgactggaatagatataaagtcctgtttaaactacctaaccttggctgtgggccgataatgcatatgtccagttctcacttaaattatgcaatgatatttctctctgaggaaattatacggaatgtaacttataaaagctttactgaatataagttataagcattttattcattagaactccaaaatagatgttcaaagttcagtccttgccatttgactgagaccacatggtgtgccccttgagtgaggctaatctttaggtttttcctatagaaaacgttcttcctccatcagtagccctttatttgatattcagaagtggaaagctttttcattctccagtagaacttttaaaaattgttacagatacctagctcttcacagatatcatgtattgtaaacagtcatgtgtcttaattttattttctctatttgagtgcataattatcctaataatcccaaagacactgacaactcaaggaacagcagtacagtactattagaagttaagtatgttgttgttatttcacatttcatttaattgtggataaatgttagacatctgttgaaataagctcatatggtggaaacgacaactatattatgaattattttcagaaatggatctttgaatagcagatcaggatttaaataataaaattatctatgaatcacttttatggtcatacatatatgatacaaatccagagttattggtgcagaaatggctacccgagagcttggtaaatttgccttggtttcttatgttaaatgtattgtgcttcccttctgtctctagaatgtggctcttcagaagacagacaattgacatttaaatttttccaaacaatgaaaaactaaattaaaaacattgcttgatatttcatttaaaattgcaccttgcttaaggtttactgaataactgaaatgtcagcaatttaaaataaattcaattgtgtgataaaatatctcacctataatagaagaaaaggaaaatcatattatttggcaattttgcagcattgtggttgcctaacaggtatatccagcagatgagaaacagtatgaaaggattgtattaacatggtaagttttgccctaaggaaaacgatcttgcattctggattcttgcagcaaagtctcaggtacttaatacgttttcttgttttatcatctgttctatgattcggcttcactttgggtggttattgaattatgtaacagagatttggttttcccaaaatgttatcacatttgaaactatgattgctttgtgttcagtccttttggaacacgtagcttccagcttaagggtagaggaaatatatacctaaaatcatcaatacatgaaagaaaaaggatggaaactatgtcctcagttttacttctaccaaaacatccctgtatgtgtgtgcatgtatgttggcgtgtgtgtgtgtgcatgcatattagtaaatgtgtgtttgcatgtgtgtgttggggagtgtatgtgatctgggtgtttgtttatctctgttattattcccctttagctttattttagtcaactctacattatgatgaatttcaaaatgaagctgtattaaaataattgtaatataacaattcaatctcacatgttactgcagatagttaacttttgctgcaatctattgtacatttgcaattttctgtgttagtaaacttagcagaatctggttatttatttttgtgtaggcttaatgttcactgaaagataagtcaattactgttagtaaaaaattaaggtactctcactgcagagatttaaggcctgggcctaatgtgctgtattatgaagccttgtgactgaaaaatatgtttacatacgttgtctatttttttaataaacttttatagctggtctatttgctcagt

SEQ ID NO: 22558 - DNA, 6267 bp, Homo Sapiens
caggagtggtgcgataggatcgggagatgcaaagacatccacatatacaggcttgtgagtggcaattccattgaagagaaattgttgaaaaatggaactaaagatctgatccgagaagtggctgctcagggaaatgactactccatggctttcttaactcagcgaaccatccaggagctgtttgaagtttattctcccatggatgatgctggcttcccggtcaaagctgaggagtttgtggtgctttctcaggaaccttctgtcacggaaaccattgcacccaaaattgcaagacctttcatagaggccctcaagagtattgagtatctggaggaggatgcccagaagtccgcacaggagggggtgctgggaccacacactgatgctctgtcatcagactctgagaacatgccgtgtgatgaagaaccatcccaattagaggagctagctgacttcatggagcagcttacaccaattgaaaaatatgctttaaattacctggaattattccatacttctattgagcaagaaaaggagagaaacagtgaggacgcagtgatgactgcagtgagggcatgggagttctggaacctgaagaccctgcaggagagggaggcccggctgcggctggagcaggaggaggcggagctcctgacctacacgcgagaggatgcctacagcatggagtatgtctacgaagatgtcgatgggcagacagaagtcatgccgctctggaccccacccaccccgccgcaggacgacagcgacatctacctcgactcggtcatgtgtctcatgtatgaagccactcccatcccagaggctaagctgccccctgtgtacgtgaggaaggagcggaagcgacacaaaacagacccctcagctgcaggcaggaagaagaagcagcgtcacggggaggcggtcgtccctcctcggtccctgtttgaccgcgcaacaccaggacttctgaaaattcgcagagagggcaaggagcagaagaagaatattctgctgaagcagcaggtgccattcgccaagcccctgccaacttttgccaaacccacagctgagcctggtcaagacaaccccgagtggctcatcagtgaggactgggcgctgctgcaggctgtaaagcagttactggagctgcctttgaacctcacaatcgtgtcacctgctcacacacctaattgggatcttgtcagtgacgttgttaactcctgtagccgaatctaccgctcttccaaacagtgccggaatcgctacgagaatgtcatcattccacgagaggaggggaagagtaaaaacaaccgtcctctccgtacgagccagatctatgcccaggatgagaatgccacacacacccagctgtacacgagccactttgacttaatgaaaatgactgctggcaagaggagtcccccaatcaaacctctgcttggcatgaatccctttcagaagaaccccaagcacgcgtctgtgttggcagaaagtggaatcaactatgacaagccgctgcctcccatccaggtggcatctctccgtgcagagcgaatcgcaaaagagaaaaaggctctggctgatcagcagaaggcacagcagccggccgtggcccagccacccccgccccagccgcagcccccaccacccccgcagcagccaccgccaccgctgccacaaccacaggcagcgggcagccagccgccagcagggccaccagctgtccagccccaaccccagccacagccccagacccagccacagcctgtgcaggccccagcgaaggcgcagcccgcaatcacgacggggggcagtgcagccgtactggcaggaaccattaaaacatcagttactgggacgagcatgcccactggtgccgtgagtggaaatgtgatcgtgaacaccatcgcaggggtcccagctgccaccttccagtccatcaacaagcgcctggcgtcgccagtggctcctggggccttgactacgccgggaggctctgctcccgcccaggtggtgcacacccagcccccgccacgggcagtcggctccccagccacggcgacccctgacctggtgtccatggcaacgactcagggtgttcgagcggtcacttctgtgacagcctcggccgtggtcactaccaacctgaccccagtgcagaccccggcacggtctttggtgccccaagtgtcccaagccacaggagttcagctccctggaaaaaccatcacacctgcacatttccagcttctcaggcagcagcagcagcagcagcaacaacagcagcagcagcagcagcagcagcagcagcagcagcagcagcagcaacagcagcagcagcaacagacgacgacgacctctcaggtgcaagttccacagatccagggccaggcccagtccccagcacagatcaaagctgtgggcaagctgacgccggaacacctcatcaaaatgcagaagcagaaactgcagatgcccccgcagcccccaccgccacaggcccagtctgcgcccccgcagccaacagcccaagtgcaagtgcagacctcgcagccgccgcagcagcagagcccccagctcacgacggtcacggccccaaggcctggtgccctgctgacgggcaccaccgtggccaacctccaggtggcccggctcacccgggttcccacttctcagctgcaggcgcaagggcagatgcagacccaggcaccccagccagcccaggtggccttggcgaagcctccggtggtgtccgtcccggcagctgtggtctcctcaccgggagtcaccaccctgcccatgaacgtcgcggggatcagcgtggcgatcggtcagccacagaaggcagcaggacagaccgtggtggcccagcccgtgcacatgcagcagctgctgaagctgaagcagcaggccgtccagcagcagaaggccatccagccccaggctgcacagggcccggcagccgtccagcagaagatcaccgcacagcagatcaccacccctggcgcgcagcagaaggttgcctacgccgcgcagccggcccttaagacccagtttcttaccacacccatctcccaggcccagaaactggccggggcccagcaagtgcagacccagatccaggttgcaaaacttcctcaagttgttcaacagcaaacacccgtggccagcatccagcaagttgcctctgcttcccagcaggcttctccacagactgtggcgctcacgcaggcgacggcggccgggcagcaggtgcagatgatccctgcagtgaccgcgactgcccaggtggttcagcagaaactcattcagcagcaggtggtgaccacggcgtcggccccgctccagactccaggcgctcccaacccagcccaggtgcccgccagctccgacagcccaagccagcagcccaagttacagatgagggtccctgctgtcaggctaaagacacctactaagcctccgtgccagtagtcagggcagcagggctgcctctcatctaaagcaaaactaccttcctcacagaaaacgctttattagtgaaccttgggaccatgtcacgcaagagattcagcactgggaaagatataattgaaacaaaatagtgtaatcattttattaaaatgcatcccacactgcaggacaaatggtccttatggagtgccgcgttctctgtactacgtggctcatggaaaaagtgacaacatggcttcctctaaatcatttcacctttcagtccccacccgcacccgtcccctagagccatagtactgtgttctgaaagccatttagaatttctttgtgagcatgtagtgctttgcacgccacagaagccgtctgccgtgtgtgaggagcatacaatggactttctaaagataaggcgtgggcttccacagtgtctgccagagtttagttctttataccttactgaaaaatgcctcgtggtcttcgcagaggggaaggcctgtctaaagtcaatcatccgagatgggttttccattccaaagaaaggcaatatggttccttccttccctcctaaaatatgacttaacttttaagagaaatgttctgacacccacctaaacacacaaggcacgttcctggcctgtgttcaagggaaatgatcagtcattgcattgttattccaaagagcagccaacagtggcctcccccaggccctaccctgcaatgggattcgctttcatttaatggaaacttctgggactgatgcccaactcagtgcactcaagacgcatctccagttttcgggggaagctggtatttgacatagtgtgttaaacagctcctgagaacctttgggacactctgccatggctggcgtgaggcccagaggaccacgcagaggcaatggtagtacagatgtcacagctgagggtacgatgaggcctgggctcagtgagccaggacgaatgtgacagacaccccttgctgccacagtcagccctttgacgaaggtgggctggtgattctggaagtattggctatagcggtgggcccagtcaactcttccttgtggacttacgacagcagattttctctaggataagcttgtgtggttctgccagtgaagcagagaaccacctgtgctgttgtggaaggcgtgccgttgagggggaaaacgaagcccagtatttgctactgtttttcctttttttactatgacaggaaaataaatgcaattttagtggaattgattgacagtgtctccttactttgaagttttcaccaaagcaaaaaggtccatatccaatagtatcctttgtgctgtggcttgattttggcctattttacattatttggtccaggaaattaggttatattaggttttttgtatactaaaaatcagttatggcacaataaagattttctgtttttaaattgtatttcatctgcttcctccccattctctcactttaagtgacattgaggaaggtattctgtcccacaggtttctgtggacagcgatacagcaggagtcagtgaaatcaactggggagctcacttgagctcttgataagaaatgtggagaaaagtaaaaaccaagctttgaagaaacagaagaaattaatcttttagttagttgaacataccaaagcagaggactggaatctgtttgttctaaccaacccgttctccctggcttggcacgtgccgtgagagcgcagcttgccggagggagggccgctgtgtgcgcctcacatctggctcccagtggaaacttttactcctcctcatccgcagatgtgatagaactgaagtatctaggaattctgcctttgtcatttgttttaatttgtgtgccctgttcattttttttgtctttcccaaatcttggtagtctccttatagttgaagataaaatgttgagtgcacttattttagaatatcctagacataactgtctaagtaaaagcgctctattaatctaaaacactacaagagaatttaacaccatctctcaaatgcttttttggagagcttaatgggattctgaatatttgcaatgtggagtttccgccccgatctcacgtcagtgagggtctcctgtctctcaagtgtgtttcctttggctgttccctaatacaaaacacggacatatttttactcgtagcactcaatttagtaacttctagatgctaccgttgacctgagttaaattcatttagtcgtgtacgtaaaaactctccttttagtgtgttattttcttggccttcccttttaaaggttaaagtttctaacctaagaattaagtacgcgttcaggaagctgttgtctaggccttccccttgtgaatctgggttcattccaatacggcaagtaagagttggaaactttgagaacacagactataaaggcagcagcccgaacactgtcagactctaattggcgaccctgggaaacagttgccctgctattctttaaagaaagacgtttattctgatgataaaaacagttagccagactgtttttaaagcacctggcgggaagcagaaggttggatccaagcccttgttcagatttggtgcctgataagacaggggtttctctttttgtgacctttattattattattttgttaactgttgtaaccagttagctgttgtgttttaagatagaaaggaacaagactaaaattgtaaatactttgtaaacatcagcatttgtacttgaatagtaggattttaaagggcattgatagcataccaaacaaaaggcaaaataaagtgacctttttatatatttttt

SEQ ID NO: 22559 - DNA, 4231 bp, Homo Sapiens
cttgcagacctaccgtgcgcagctgcagcaggtggagctggccttgggcgccggcctggattcgtctgagcaggctgacctgcgccagctgcagggggacctgaaggagctcatcgagctcaccgaggccagcctggtgtctgtcaggaagagcaggttgttggccgcgctggacgaagagcgcccgggccgccaggaagatgctgagtaccaggctttccgggaggccatcactgaggcggtggaggcaccagcagcggcccgtgggtccggatcagagaccgttcctaaagcagaggcggggccagaatctgcggcaggtgggcaggaggaggaagagggagaggacgaggaagagctgagtgggacaaaggtgagcgcgccctactacagctcctggggcactctggagtatcacaacgccatggtggtgggaacggaagaggcggaggatggctcggcgggtgtccgtgtgctttacctgtaccccactcacaagtctctgaagccgtgcccgttcttcctggagggaaagtgccgctttaaggagaactgcaggttctcccatgggcaggtggtctctctggatgagctgcgccccttccaggacccagacctgagctccctgcaggccggctctgcgtgtctggccaagcaccaggatggcctctggcacgcagcacgcatcaccgatgtggacaacggctactacacagtcaagtttgactcgctgctgctgagggaggccgtggtggagggggacggcatcctgcccccactgcgcacagaggccacagagtccgactcagacagcgacggtacgggtgactccagctatgccagagtggtggggtcagatgctgtggactctgggacctgcagctctgcctttgctggctgggaggtgcacacgcgaggtataggctccagactcctcaccaagatgggctatgagtttggcaagggtttgggccgacacgcggaaggccgggtggagcccatccatgctgtggtgttgcctcgagggaagtcgctggaccagtgtgtggagaccctgcagaagcagaccagggttggcaaggctggcaccaacaagccccccaggtgccggggaagaggggccaggcctgggggccgcccagctcctcggaatgtgtttgacttcctcaatgaaaagctgcaaggtcaggctcctggggccctagaagccggggcggccccagcggggaggaggagcaaggacatgtaccatgccagcaagagtgccaagcgggccctgagcctgcggctcttccagactgaggagaagatcgagcgaacccagcgggacatcaggagcatccaggaggctctcgcccgcaacgctggccggcatagcgtggcgtcagcccagctgcaggagaagctggcaggagcccagcgccagctggggcagctccgggctcaggaagccggcctgcagcaggagcagaggaaggcagacacccacaagaagatgactgagttctagagaccccacaagcactatggacgaagcgtgggaccccagcacgggctgccctcaggaagaccagtgttgcccgaggaggggccggcctgctggcctggggcgtgcggacactgctgagtggagacagagctgcggggtcccatctggacacttacttgcccacctgccagtgtcttgggcatttccttggcaaggacattaaagtgatttcatcacagtgtcattcagtggagatcagctggctgcagggtctctggggagagaagggtctgtgcagggctgtggtgagagacgggctgggctggaggggcctaggaggccggcattctcccttcttacccttctctgaccaaggcagatcggaggccagggtgcccgccaggctgcctgacacccacagatgggtggagctcagtgctgctccagcgggcgagacgggcgggagaggactgtggcccaccacgtggggcactcttggtgaggcaggcggacctggccctgtgggtttgggggttctgtgccagctctgctcacgtcttcgtgtgtggaggggttgtgagttaggctgtcagaacagtgcgggctagaggcgcacacgtttcatctaggcttcgggcggggcgcagcaggtgggtgaggctgcggtggtggctgctgcccagggtgggaggctcaggggaggcgcttggcgacaggagcaggaagtgatgaggtggggagctcagccgagggctgcacaaagaccttcctggcctgccccagacagagctgaggacccctggccgtgggcttggtaagtgccctcctggggggcagctggggtctgggaggccttgggatgtggctgcagctgggtcagtcagccaggctgaagcccactccctgggtctgagcagactggccccaaactccagagaccacccctcaccccccagcttctgtctctgctgctggactgtgctgtttgtaaggcatcccccaccccgagaagttctgctaagatccccaagaaggggacagatcctctctggcagagacactggcagacaagaagagccagagagaagtggggtgggggcatcagcacccccagcagctgctgctgcctgctgacccagcctccagctcctccgggtgcagggtccctcctgctgaccagcctccagctcttcccagttctgggctccgcagcgagcggcttgggggcactacctgacacaggagaccatgtctgggcagagggtggctgcaggtggagtctgtggcctgtggcgcacacccaggggctcccccgatgctggttactatctgggctatggtggccacagctgtcctgcccctcctcacggccgtgctgggtgttaccgtggtcacccgcagggacacggaggggccaggcagagcagccctagttcacctcaccgggagcccccgccagaaggtgggcacctctgggagggagggactgccaggccttggggcttcctgtgctgagtcagagctggaacgggagacgcaggagccccgcagccgcgggaggtgcagatttggggctgccaggtggcgccaggtccccttggccagcccccagcgcccctttcttctgtccccagggcctcggcttcacaggatggggctgccagtgtcctgggcccctcctgccctctgggttctagggtgctgcgccctgctcctctcgctgtgggcgctgtgcacagcctgccgcaggcccgaggacgctgtagcccccaggaagagggcgcggaggcagcgggcgaggctgcagggcagtgcgacggcggcggaagcgtccctactgaggcggacccacctctgctccctcagcaagtcggacaccagactgcacgagctgcaccggggcccgcgcagcagcagggctctgcggcctgccagcatggatctcctgcgcccacactggctggaggtgtccagggacatcaccggaccgcaggcagccccctctgccttcccacaccaggagctgccccgggctctgccggcagctgcagccaccgcagggtgcgctggcctcgaggccacctattccaacgtggggctggcggcccttcccggggtcagcctggcggccagccctgtggtggccgagtatgcccgcgtccagaagcgcaaagggacccatcgcagtccccaagagccacagcaggggaagactgaggtgaccccggccgctcaggtggacgtcctgtactccagggtctgcaagcctaaaaggagggacccaggacccaccacagacccgctggaccccaagggccagggagcgattctggccctggcgggtgacctggcctaccagaccctcccgctcagggccctggatgtggacagcggccccctggaaaacgtgtatgagagcatccgggagctgggggaccctgctggcaggagcagcacgtgcggggctgggacgccccctgcttccagctgccccagcctagggaggggctggagacccctccctgcctccctgccctgaacactcaaggacctgtgctccttcctccagagtgaggcccgtcccccgccccgccccgcctcacagctgacagcgccagtcccaggtccccgggccgccagcccgtgaggtccgtgaggtcctggccgctctgacagccgcggcctccccgggctccagagaaggcccgcgtctaaataaagcgccagcgcaggatgaaagcg

SEQ ID NO: 22560 - DNA, 2688 bp, Homo Sapiens
atgacagcttggaccatgggcgcccgcggtctggacaagcgaggaagtttctttaagctcattgacacaattgcctcggagatcggagaactgaaacaggagatggtgcggacagatgtcaacctggaaaatggcctggaacccgctgaaacccacagcatggtaagacacaaggatggtggctattccgaggaagaggacgtgaagacctgtgcccgggactcaggctatgacagcctctccaacaggctcagcatcttggaccggctcctccacacccaccccatatggctgcagctgagtctgagtgaggaggaggcagcagaggtcctgcaggcccagcctccggggatcttcctggttcataaatctaccaagatgcagaagaaagtcctctccctccgcctgccctgtgaatttggggccccactcaaggaatttgccataaaggaaagcacatacaccttttccctggaaggatccggaatcagtttcgcagatttattccggctcattgctttctactgcatcagcagggatgttctaccatttaccttgaagttgccttatgccatttcaacagccaagtcggaggctcagcttgaagaactggcccagatgggactaaatttctggagctccccagctgacagcaaacccccgaaccttccacctccccataggcctctttcctccgacggtgtctgtcctgcctccctgcgtcagctctgccttataaatggagtgcattctatcaaaaccaggacgccttcagagctggagtgcagccagaccaacggggctctgtgctttattaatccccttttcttgaaagtgcacagccaggacctcagtggaggcctgaaacggccgagcacaaggactcccaacgcgaatggcacggagcggactcggtcccccccacccaggcccccgccacccgctattaatagtctccacacaagccctcggctggccaggactgaaacccagacgagcatgccagaaacagtcaaccataacaaacatgggaacgtagctctgcctggaacgaaaccaactcccatccctccaccccggctgaagaagcaggcttcttttctggaagcagagggcggtgcaaagaccttgagcggcggccggccgggcgcaggcccggagctggagctgggcacagctggcagcccaggtggggccccgcctgaggccgccccgggggattgcacaagggccccgccgcccagctctgaatcacggcccccgtgccatggaggccggcagcggctgagcgacatgagcatttctacttcctcctccgactcgctggagttcgaccggagcatgcctctgtttggctacgaggcggacaccaacagcagcctggaggactacgagggggaaagtgaccaagagaccatggcgccccccatcaagtccaaaaagaaaaggagcagctccttcgtgctgcccaagctcgtcaagtcccagctgcagaaggtgagcggggtgttcagctccttcatgaccccggagaagcggatggtccgcaggatcgccgagctttcccgggacaaatgcacctacttcgggtgcttagtgcaggactacgtgagcttcctgcaggagaacaaggagtgccacgtgtccagcaccgacatgctgcagaccatccggcagttcatgacccaggtcaagaactatttgtctcagagctcggagctggacccccccatcgagtcgctgatccctgaagaccaaatagatgtggtgctggaaaaagccatgcacaagtgcatcttgaagcccctcaaggggcacgtggaggccatgctgaaggactttcacatggccgatggctcatggaagcaactcaaggagaacctgcagcttgtgcggcagaggaatccgcaggagctgggggtcttcgccccgacccctgattttgtggatgtggagaaaatcaaagtcaagttcatgaccatgcagaagatgtattcgccggaaaagaaggtcatgctgctgctgcgggtctgcaagctcatttacacggtcatggagaacaactcagggaggatgtatggcgctgatgacttcttgccagtcctgacctatgtcatagcccagtgtgacatgcttgaattggacactgaaatcgagtacatgatggagctcctagacccatcgctgttacatggagaaggaggctattacttgacaagcgcatatggagcactttctctgataaagaatttccaagaagaacaagcagcgcgactgctcagctcagaaaccagagacaccctgaggcagtggcacaaacggagaaccaccaaccggaccatcccctctgtggacgacttccagaattacctccgagttgcatttcaggaggtcaacagtggttgcacaggaaagaccctccttgtgagaccttacatcaccactgaggatgtgtgtcagatctgcgctgagaagttcaaggtgggggaccctgaggagtacagcctctttctcttcgttgacgagacatggcagcagctggcagaggacacttaccctcaaaaaatcaaggcggagctgcacagccgaccacagccccacatcttccactttgtctacaaacgcatcaagaacgatccttatggcatcattttccagaacggggaagaagacctcaccacctcctag

SEQ ID NO: 22561 - DNA, 1560 bp, Homo Sapiens
cgaccatgcccagcctgctgctgctgttcacggctgctctgctgtccagctgggctcagcttctgacagacgccaactcctggtggtcattagctttgaacccggtgcagagacccgagatgtttatcatcggtgcccagcccgtgtgcagtcagcttcccgggctctcccctggccagaggaagctgtgccaattgtaccaggagcacatggcctacataggggagggagccaagactggcatcaaggaatgccagcaccagttccggcagcggcggtggaattgcagcacagcggacaacgcatctgtctttgggagagtcatgcagataggcagccgagagaccgccttcacccacgcggtgagcgccgcgggcgtggtcaacgccatcagccgggcctgccgcgagggcgagctctccacctgcggctgcagccggacggcgcggcccaaggacctgccccgggactggctgtggggcggctgtggggacaacgtggagtacggctaccgcttcgccaaggagtttgtggatgcccgggagcgagagaagaactttgccaaaggatcagaggagcagggccgggtgctcatgaacctgcaaaacaacgaggccggtcgcagggctgtgtataagatggcagacgtagcctgcaaatgccacggcgtctcggggtcctgcagcctcaagacctgctggctgcagctggccgagttccgcaaggtcggggaccggctgaaggagaagtacgacagcgcggccgccatgcgcgtcacccgcaagggccggctggagctggtcaacagccgcttcacccagcccaccccggaggacctggtctatgtggaccccagccccgactactgcctgcgcaacgagagcacgggctccctgggcacgcagggccgcctctgcaacaagacctcggagggcatggatggctgtgagctcatgtgctgcgggcgtggctacaaccagttcaagagcgtgcaggtggagcgctgccactgcaagttccactggtgctgcttcgtcaggtgtaagaagtgcacggagatcgtggaccagtacatctgtaaatagcccggagggcctgctcccggcccccctgcactctgcctcacaaaggtctatattatataaatctatataaatctattttatatttgtataagtaaatgggtgggtgctatacaatggaaagatgaaaatggaaaggaagagcttatttaagagacgctggagatctctgaggagtggactttgctggttctctcctcttggtgggtgggagacagggctttttctctccctctggtgaggactctcaggatgtagggacttggaaatatttactgtctgtccaccacggcctggaggagggaggttgtggttggatggaggagatgatcttgtctggaagtctagagtctttgttggttagaggactgcctgtgatcctggccactaggccaagaggccctatgaaggtggcgggaactcagcttcaacctcgatgtcttcagggtcttgtccagaatgtagatgggttccgtaa

SEQ ID NO: 22562 - DNA, 1451 bp, Homo Sapiens
gccaggaccctggaaggaagcaggatggcagccggaacagcagttggagcctgggtgctggtcctcagtctgtggggtgagccactccctcaaccccactgaccctccctgcagaaagcactttacccccacaccccagtcgtcctagaacttttcccagaacccgaggaagtgcctttcaaggtccctcacccaccctgtccaaattttgttagccctcattcccttcctacccctctaccatggtgctatctcccaggggcagtagtaggtgctcaaaacatcacagcccggattggcgagccactggtgctgaagtgtaagggggcccccaagaaaccaccccagcggctggaatggaaactgaacacaggccggacagaagcttggaaggtcctgtctccccagggaggaggcccctgggacagtgtggctcgtgtccttcccaacggctccctcttccttccggctgtcgggatccaggatgaggggattttccggtgccaggcaatgaacaggaatggaaaggagaccaagtccaactaccgagtccgtgtctaccagattcctgggaagccagaaattgtagattctgcctctgaactcacggctggtgttcccaataaggtggggacatgtgtgtcagagggaagctaccctgcagggactcttagctggcacttggatgggaagcccctggtgcctaatgagaagggagtatctgtgaaggaacagaccaggagacaccctgagacagggctcttcacactgcagtcggagctaatggtgaccccagcccggggaggagatccccgtcccaccttctcctgtagcttcagcccaggccttccccgacaccgggccttgcgcacagcccccatccagccccgtgtctgggagcctgtgcctctggaggaggtccaattggtggtggagccagaaggtggagcagtagctcctggtggaaccgtaaccctgacctgtgaagtccctgcccagccctctcctcaaatccactggatgaaggatggtgtgcccttgccccttccccccagccctgtgctgatcctccctgagatagggcctcaggaccagggaacctacagctgtgtggccacccattccagccacgggccccaggaaagccgtgctgtcagcatcagcatcatcgaaccaggcgaggaggggccaactgcaggctctgtgggaggatcagggctgggaactctagccctggccctggggatcctgggaggcctggggacagccgccctgctcattggggtcatcttgtggcaaaggcggcaacgccgaggagaggagaggaaggccccagaaaaccaggaggaagaggaggagcgtgcagaactgaatcagtcggaggaacctgaggcaggcgagagtagtactggagggccttgaggggcccacagacagatcccatccatcag

SEQ ID NO: 22563 - DNA, 4920 bp, Homo Sapiens
gcgcgcgcgccgctgcggctttttctctggcctccgccgcgcgctcctcctcgtcccagcgctagcgggcacgcggttcctttttgggagctttccgagtgccaggcgccggccggctgcgaagacgcggtgggccgcccctccgattgaaatcacagaagatattcgtgttcttcttaagagaaaaagaggacatttaagaaaaacgctatggcaaagagaataaaagctaagcccacttcagacaaacctggaagtccatatcgctctgtcacacacttcgactcactagctgtaatagacatccctggagcagatactctggataaattatttgaccatgctgtatccaagtttgggaagaaggacagccttgggaccagggaaatcctaagtgaagaaaatgaaatgcagccaaatggaaaagtttttaagaagttaattcttgggaattataaatggatgaactatcttgaagtgaatcgcagagtgaataactttggtagtggactcactgcactgggactaaaaccaaagaacaccattgccatcttctgtgagaccagggccgaatggatgattgcagcacagacctgctttaagtacaactttcctcttgtgactttatatgccacacttggcaaagaagcagtagttcatgggctaaatgaatctgaggcttcctatctgattaccagtgttgaacttctggaaagtaaacttaagactgcattgttagatatcagttgtgttaaacatatcatttatgtggacaataaggctatcaataaagcagagtaccctgaaggatttgagattcacagcatgcaatcagtagaagagttgggatctaacccagaaaacttgggcattcctccaagtagaccaacgccttcagacatggccattgttatgtatactagtggttctactggccgacctaagggagtgatgatgcatcatagcaatttgatagctggaatgacaggccagtgtgaaagaatacctggactgggaccgaaggacacatatattggctacttgcctttggctcatgtgctagaactgacagcagagatatcttgctttacctatggctgcaggattggatattcttctccgcttacactctctgaccagtccagcaaaattaaaaaaggaagcaaaggagactgtactgtactgaagcccacacttatggctgctgttccggaaatcatggatagaatttataagaatgttatgagcaaagtccaagagatgaattatattcagaaaactctgttcaagatagggtatgattacaaattggaacagatcaaaaagggatatgatgcacctctttgcaatctgttactgtttaaaaaggtcaaggccctgctgggagggaatgtccgcatgatgctgtctggagggggcccgctatctcctcagacacaccgattcatgaatgtctgcttctgctgcccaattggccagggttatggactgacagaatcatgtggtgctgggacagttactgaagtaactgactatactactggcagagttggagcacctcttatttgctgtgaaattaagctaaaagactggcaagaaggcggttatacaattaatgacaagccaaaccccagaggtgaaatcgtaattggtggacagaacatctccatgggatattttaaaaatgaagagaaaacagcagaagattattctgtggatgaaaatggacaaaggtggttttgcactggtgatattggagaattccatcccgatggatgtttacagattatagatcgtaagaaagatctagtgaagttacaagcaggagagtatgtatctcttgggaaagtagaagctgcactgaagaattgtccacttattgacaacatctgtgcttttgccaaaagtgatcagtcctatgtgatcagttttgtggttcctaaccagaaaaggttgacacttttggcacaacagaaaggggtagaaggaacttgggttgatatctgcaataatcctgctatggaagctgaaatactgaaagaaattcgagaagctgcaaatgccatgaaattggagcgatttgaaattccaatcaaggttcgattaagcccagagccatggacccctgaaactggtttggtaactgatgctttcaaactgaaaaggaaggagctgaggaaccattacctcaaagacattgaacgaatgtatgggggcaaataaaatgttgttgtcttattgacagttgtgcaggaggtagcctggtggttttcaacctctagaattttaagcctttgttgaactgttagaatgtaaggtatatcattctaaagatagagtaaaaagaaaacaaaaccaaaagttattaaaattgttgtccggtttactttaacttagttttgcatagttctagtgcagctgaaattgaaaagttatttccctttagctgtgttattatagagcagaaattctgtttttaaaaattagcctaagatatacttgtttttgtaaagaaaaatatttaatgttgaacaaaataaattggagttggagtagaatgtagtttgaggaaatttgcagcttccaatgcctcttgtcttcctatttcagaagtttaaatattaagcatgacagaaaatattgtatttaacactactcaaagcaaaagtgctgcagggctttaaaattctcttccaaccatttatcttgaaggaaaaattcaatagtaatataatacacaaaatcaaataataccttaggaggtattaagattataattgttgcataggttagatatagagtcattgtaatgttgtgaataattacagtgcctaaaataagaatagaacaacatatacaacaccaaaaaatatctagtaatatatttaaagggaaattgagctgctttttttgaaactttgagatctaaaaataactgtaattatttgaatgactaagaggaaagtacattttttgaaatgctgaaaattgcctttctgtgtttattcaaactgaaaagctgagaccaagagcaaggaaggtaaaaagttaacaggcaaacatttcctcttagaaaaggtgataaaatcataagtatttggaattagaacccttgcacagcactgaacctgggaaagagatttaaactctgaatttatctttgataacagggattgattttaaaatgtacatgtattaaattacatttgtaatttaaggtctgtttgctgttgctgattttattcttgatcagtagtttgcatttcagaaagcctttcattttgctttaattttagcaaagcgggttataatgaatgacttccccaatatcttgcttgaacttacaggtgattaacttggatgagttttgggaagttaaagggaagaaaacactgttatcattttttcctgtttgggaagagcttagaaactggaaatactagatttgggagaagggcagagttacttgataagggactgatgtttgtgcagtaacttgggagtgtggtttctttttgaatctttaattaaaacctgggattatatatccctgataaatattcacacttgaaccatagttactgtaaaatgcaaaaaatcttaatactgttattctttgcactttttcttaatcattttttatatatatgcatatatatatgtgtgtgtgtgtgttgcttatgttgttttgtacagatgtgggccaccattgcaacaaaatacattctttttgctctaaaatatttatgaagaaaatacttaaatgttatgtatatggtggtaataagggaaaaatcaagtattataaacaagaatgaaggtttttgtaaagatttctgttcagcgttttgcaaggtaaaattttaggcaagtttttccctgaagttatgtgtatgtgagtattctcattcttcccaacttgcctttgaagagtgaaataccattattatcaagtagactactgttcagcttttattcctgccctgctgtttatcccttaagaatgagtttcttagacttttccaatatgtgattttttttcccatttagaatggtgattttaaatgtgtgagtgcatgtactatcttatctcagatatttgcacccccaatctgcccccaactcccaaaagctagaacactgccaactgatctgttataggtcctttagaaacacataattaacacttaaggttgggtgctgctaattctttgcaaaaatccaaatattgttaagggaccagggagatgccactaccccttgattttccatctaaaaatatacatgtttatgtaaacaaatctttccatatccatagtgacttttcaagtatttaagcctaaagattttgatctcacatttttatacctgtttaaattgctcacagttattacatacacatcagccatcaactaaagttgtactttaaaaatttactacaatatgtacatttctaagtcaaacacttgtgacttttgctttaattccatgaatgttcctgcctccttgatatttgtatttattctttttttctctagagtagaggtataattgtgtgatatttcagaaatacagataaatgattcaaaaagtcacagttaaggagaatcatgtttctttgatcatgaataactgattagtaagtcttgcctatattttcctgatagcatatgacaaatgtttctaaggtaacaagatgagacagataaagattgtgtggtgttttggatttggagagaaatattttaatttttaaatgcagttacaaattataatgtattcatatttgtactttctgttaaaatgcatgattgcagaattgtttagattttgtgtttattcttgatgaaaagctttgtttgttcttgtttttaagtttgcactccaatcttaagaaataaatccacccatgttatccga

SEQ ID NO: 22564 - DNA, 3515 bp, Homo Sapiens
aaaacaaagtttgatacttctaatatttggaattagtcacaacatataggcatttacataaatttcattattttaatgctatttttcttcctttcattataatcctcaatgactgccttacctctgcctaccctttgacttcatagattataccattatccctttccctcaatgggttccatccatactggcctccttccactcaggctctgtccagcctgacactcttagcccttcctgttccctctgctcagaatgttttttcttttttatttttttgagacagagtgttgttctgtcacccaggctggagtgcagtggtgcgatctcagctcactgcaatatccacctcctgtgttcaagcgattctcctgcctcaacctcccgagtagctgggactacccgcgcgcgccaccacgcccggctaatttttgtatttctagtagagagggggttttactgtgtttcactgtgttggccaggctggtctcaaactcctgacctcgtgatccgcctgcctcagcctccccaagtgctgggatcacaagcgtgagccaccgcgcccggtcagaatgttttttcaataattattctttgaatgggtccttcccatcattcaggggactcaactgtcaatttccaaagaaagatctttcccaatcatctgactttacgtagccaccctccagcttccacttattttgttttgtcttcaaagcattccagaacaatactacctgctgtgtttgtttccctactatgcttctccctagaatgtggcgtccatgaaagaatgtggataagaactttcctggttcacaaagttaaacccaaggctgaggtcatacatgacgggggcttgtaaatatcaactaatattttaatataaatgagtctgaaatcaggacacttctgggttcaagtccccgctgccactttttagcttctgagtgacttgaggcaaatgatttcgcctctctggacctcttttttcatctgtagcttggggataacactgactaacatggccacgctgagcactgcaaatctagcctgattgccagtcagaatgcacgcccggcctcgctgtttcaggagggctgtcctccggagttcagcaaggttaaaggcaaacctctgcctccacagcctggcaggggactggtggcaggatgtcagccctccgtttcaggggtctaaaggaacacagatttcgtttttggtggagaaaggacagagccagaggctgggcagcgagcggggcctgctcaccgcttggagatctcctggtagcgtagctgcagcttcccctgcaggtcatgctgtgggaagaggagaggagaggtcggcctgcaaggcaccccaggagagaggagagaggaaaggagagggcaagggaccagggatggtccggggatgcgcattttaagggaaggcaggggatgaacactcggggaaacggatgtgggtcctgcaggtgaagagcaaagccagagtccgggcccacagatccaaggctaagaaggtcggggactggggaaatcccaggcctgagtggttcccaggccaggagagggtcccgggctgaaggggtgactagctgggggttcccagggagattcggggagagcgaagggtcccggcttaggagggaggtgaggagcaggagcgggtcccggacacacggagcccgaagccccccatggtgcagccctgtccgccccgcgcaccccggacgcccagttccgcagccgctggatgagacgggtggcggacgccatcttccgtccgcgatactgaagggcgcagccggtgacgtctccaccgctggggctgctgggaaagacgcggcgtggtatcgcgagacgggagtgggcggtgctagaacgtcctataaaggctctccccgaagcacgtgactcctctccgccagaccgccgccgcgccgccatcatggacaccagccgtgtgcagcctatcaagctggccagggtgaggtgggggcccgaatttgggggcagggggagggattagaggagccaaacgggccgggtctgaacccagcttctttcctccaggtcaccaaggtcctgggcaggaccggttctcagggacagtgcacgcaggtaatcgggtgggggcatttggccgactgccggcgacctaaaccctgatgtgacctctaccctgccctaacccctgccagccggaatccgggagccgattctcatttcatcacggggttctgatggttccctttaacgatctgtattctggccccgacacgttctctgaattcatatctgcttcccactccgcggtgcctttccgcggcccgcccttacttcttcctccactccggtggggacccgtaggtgcgcgtggaattcatggacgacacgagccgatccatcatccgcaatgtaaaaggccccgtgcgcgagggcgacgtgctcacccttttggagtcagagcgagaagcccggaggttgcgctgagcttggctgctcgctggtgggtgcaaagaggacacccccttgatagacctttggttggtggtagggaggcttcgttaagcccagggtgagagggtttgggaggcagagtctacatacagagactgacaagagggaggcgggagtttgccaattgctgcggggcctgtcaacatctcatgtttgggtctgtttacagggtcttggatgtcgggttcgaccacttggccgatgggaatggtctgtcacaatctgctccttttttttgtccgccacacgtaactgagatgctcctttaaataaagcgtttgtgtttcaagttaactcaggttcttgtctgggttatacgactagggtttctccaggtttcttgagtggctcccaggcggtcaccgatcctccgcactctggaaatcctggccgtgcggtcttgccaaacgaagcttttcctttttgaggcggggggtcgtgtttgtcgattgcaccctctaccccaaacaaaacacaagcgtagtaggaatgttttattagcaaagaagtttcagagagtgggtggatcagggctctatcacttggtccccacctcaccttggtggggccagagtgagccccttcctgccacagtcaccccaactgaaattgcctttctcttcggccagtgttagcctctgagcaggggaccctggacccttctgtgcgccaaaggctgaggtgactgacgaggagatctccccacagctaggtgtagtgagccagacgaggcagcttactgaacctgggggttctctccattgtcaccgcattctccttcaccaggtgtggctgtctgggagccagggggtgactcgctctggagagaggggaaaagaggggggcctgctgcaatctccttgaggcaggaaacgtgggattcagccccagcctcacttagtggaggttcttttaccatggacccaggctgcctggtttgtatccaacctctgccccttctgacctggaagaggcgcttgaccttcctcc

SEQ ID NO: 22565 - DNA, 1072 bp, Homo Sapiens
aggattcggcacgagctgagttctaaagttcctgttgcttcagacaatggatgagcaatcacaaggaatgcaagggccacctgttcctcagttccaaccacagaaggccttacgaccggatatgggctataatacattagccaactttcgaatagaaaagaaaattggtcgcggacaatttagtgaagtttatagagcagcctgtctcttggatggagtaccagtagctttaaaaaaagtgcagatatttgatttaatggatgccaaagcacgtgctgattgcatcaaagaaatagatcttcttaagcaactcaaccatccaaatgtaataaaatattatgcatcattcattgaagataatgaactaaacatagttttggaactagcagatgctggcgacctatccagaatgatcaagcattttaagaagcaaaagaggctaattcctgaaagaactgtttggaagtattttgttcagctttgcagtgcattggaacacatgcattctcgaagagtcatgcatagagatataaaaccagctaatgtgttcattacagccactggggtggtaaaacttggagatcttgggcttggccggtttttcagctcaaaaaccacagctgcacattctttagttggtacgccttattacatgtctccagagagaatacatgaaaatggatacaacttcaaatctgacatctggtctcttggctgtctactatatgagatggctgcattacaaagtcctttctatggtgacaaaatgaatttatactcactgtgtaagaagatagaacagtgtgactacccacctcttccttcagatcactattcagaagaactccgacagttagttaatatgtgcatcaacccagatccagagaagcgaccagacgtcacctatgtttatgacgtagcaaagaggatgcatgcatgcactgcaagcagctaaacatgcaagatcatgaagagtgtaaccaaagtaattgaaagtattttgtgcaagtcatacctccccatttatgtctggtgttaagattaatatttcagagctagtgtgctttgaatc

SEQ ID NO: 22566 - DNA, 1380 bp, Homo Sapiens
gcggcaacagcggggccgatgtgtagttggtgactgcctctccagatgctgaggtgcctgtatcattggcacaggccagtgctgaaccgtaggtggagtaggctgtgccttctgaagcagtatctattcacaatgaagttgcagtctcccgaattccagtcacttttcacagaaggactgaagagtctgacagaattatttgtcaaagagaatcacgaattaagaatagcaggaggagcagtgagggatttattaaatggagtaaagcctcaggatatagattttgccaccactgctacccctactcaaatgaaggagatgtttcagtcggctgggattcggatgataaacaacagaggagaaaagcacggaacaattactgccaggcttcatgaagaaaattttgagattactacactacggattgatgtcaccactgatggaagacatgctgaggtagaatttacaactgactggcagaaagatgcggaacgcagagatctcactataaattctatgtttttaggttttgatggcactttatttgactactttaatggttatgaagatttaaaaaataagaaagttagatttgttggacatgctaaacagagaatacaagaggattatcttagaattttaagatacttcaggttttatgggagaattgtagacaaacctggtgaccatgatcctgagactttggaagcaattgcagaaaatgcaaaaggcttggctggaatatcaggagaaaggatttgggtggaactgaaaaaaattcttgttggtaaccatgtaaatcatttgattcaccttatctatgatcttgatgtggctccttatataggtttacctgctaatgcaagtttagaagaatttgacaaagtcagtaaaaatgttgatggtttttcaccaaagccagtgactcttttggcctcattattcaaagtacaagatgatgtcacaaaattggatttgaggttgaagatcgcgaaagaggagaaaaaccttggcttatttatagttaaaaataggaaagatttaattaaagcaacagatagttcagacccattgaaaccctatcaagacttcattatagattctagggaacctgatgcaactactcgtgtatgtgaactactgaagtaccaaggagagcactgtctcctaaaggaaatgcagcagtggtccattcctccatttcctgtaagtggccatgacatcagaaaagtgggcatttcttcaggaaaagaaattggggctctattacaacagttgcgagaacagtggaaaaaaagtggttaccaaatggaaaaagatgaacttctgagttacataaagaagacctaaaactgatggctactaaaaagcagagcattt

SEQ ID NO: 22567 - DNA, 10939 bp, Homo Sapiens
aggaggaaatttgcaagaggcggcagcccctgagcgcccagagctcttgaaaggccacccaggagaggtgtgagacccggcgtcagcatccgtccaggtgggacccgctgagcgccgtggccagtcccccattcccatcccggcaccccaaaggcgcgctcgcccgattgcttcgagttccccgacctggggattttttttttagccgctggtggtgggcgcctcgtgggctaaggcccggcgcctgctctgctacccgcgctgcctttagcggtcgcccccgccgccgctgccagggacgtgctgggaaagcccaagccccgggagaagatgccggccatcctggtcgcctccaaaatgaagtcgggactgcccaaacccgtgcacagcgccgcgcccatcctgcacgtgcccccggcccgggcgggcccccagccctgctacctgaagttgggaagcaaggtggaggtgagcaagaccacctatcctagccagatccccctgaaatcgcaggtgctgcaggggctgcaggagccagcgggggaggggctcccgctgcggaagagcggctcggtggaaaacgggttcgatacccagatctacacagactgggccaatcattacctaaccaaatccggccacaagcgtctcatcaaggatctccagcaagatgtgacagatggcgtcctcctggcccagattatccaggttgtggcaaatgaaaagattgaagacatcaatggctgtccgaagaacagatcccaaatgattgaaaacatagatgcctgcttgaatttcctggcagctaagggaataaacatccaggggctgtctgcagaagagatcaggaatggaaacctcaaggccattctaggcctcttcttcagcctctcccgatacaagcagcagcagcagcagccccagaagcagcacctctcctcacctctgccgcccgccgtatcccaggtggccggggccccctcccagtgccaggctggcacccctcagcagcaggtgccagtcactccccaagccccgtgccagcctcaccagccagcgccacatcagcagtcaaaagcacaagctgaaatgcagtccagactttcaggtcctaccgcgagggtatccgctgcaggcagcgaggccaaaacacgcggagggtcaactactgctaacaaccgacgcagccagagctttaacaactatgataaatccaaaccagtcacctccccacccccaccgccaagcagccacgagaaagagcctttggcaagttcagcctcctcccaccccggaatgagtgacaatgcacctgcttccttggagagcggcagcagctccacccctactaattgcagtacctcctcggccatcccgcagcccggtgcagccaccaagccttggcgcagcaaatccctcagcgtgaagcacagtgccacggtatccatgctctcggtcaagcctcctgggcctgaggcccccaggcccacacctgaagccatgaagccggcccccaacaatcagaagtccatgctggaaaagctgaaacttttcaacagtaaagggggctcaaaggcaggtgaggggccggggtcccgggacacaagctgtgagcggctggagactctgcccagcttcgaagagagcgaggagctggaggccgccagtcgcatgctcaccaccgtgggccctgcttccagcagccccaagattgcactcaagggcattgcccagaggacttttagccgggcactgaccaacaagaagagttctctgaaaggcaatgagaaagagaaggagaaacaacagcgggagaaggataaggagaaaagcaaggaccttgccaagagagcctctgtgacggagaggctggacctcaaggaggagccaaaagaagaccccagtggagcagctgtgcccgagatgccaaaaaagtcctccaagattgccagcttcatccccaaaggggggaagctcaacagtgccaagaaggagcccatggccccttcccacagtggaataccaaaaccaggaatgaagagcatgcccgggaaatccccaagtgccccagcgccttccaaggaaggggagcggagccggagtgggaagctgagctcaggactcccccagcagaagccccagctggacggcagacactccagttcctcttccagcctggcgtcctcagaaggaaaaggcccaggagggaccaccctgaaccacagcatcagcagccagactgtcagtgggtctgtcgggaccacccagaccacaggaagcaataccgtcagtgttcagctacctcagccccagcagcaatacaaccatcccaacactgccacggttgcacctttcctgtacaggtctcagacggacactgaagggaatgttactgccgagtcaagctcaacaggtgtgagcgtggagcccagccacttcaccaagactggacagcctgctctggaagaactcactggggaagatcctgaggctcggcggctgcggacagtgaagaacatcgctgatctgcggcagaatttggaggaaaccatgtccagtttaaggggaactcaggttacacacagcacattggaaaccacgtttgacaccaatgtcaccacggagatgagtggccgtagcatactcagcttgacagggaggcccacacctctgtcctggagactgggccagtccagccctcggctccaagcaggagacgccccctcaatgggcaatgggtatccccctcgagccaacgccagcaggttcatcaacactgagtcaggtcgctatgtgtactccgcccctctgagaaggcagctggcctcccggggcagtagtgtctgccatgtggacgtctcagacaaggcaggagatgagatggacctggaaggcatcagcatggacgcccccggctacatgagcgatggggatgttctgagcaagaacatccggaccgatgacattacaagcggatacatgactgatggtggacttggcctctatacccgtcgcctgaaccggctccctgatgggatggctgtggtacgggagaccctgcaacgaaatacctccctgggcctcggagacgctgacagctgggacgacagcagctccgtcagcagcggcatcagcgacaccatagacaacctcagcactgatgacatcaacaccagctcctccatcagctcttatgccaacacacctgcctcctctcgaaaaaacctggatgtgcagactgatgctgagaagcactcacaggtggagaggaattccctgtggtctggtgatgatgtcaagaaatcagacggaggctcagacagcggcataaaaatggagccaggttccaagtggaggcggaatccttctgatgtgtctgacgagtccgacaaaagcacgtcgggcaagaagaatcctgtcatctcccagacaggctcatggcggcgaggcatgacagctcaggtgggcatcaccatgccaaggacgaaggcttcagccccggcaggcgcactgaagaccccaggaactggaaaaacagacgacgcaaaggtgtctgagaaaggaaggctttctcctaaagcctcccaggtgaagcgctccccatcagatgcaggccggagcagtggtgacgaatccaaaaagcccctccccagcagctctaggacacctactgccaatgccaacagctttgggttcaagaagcagagtggttccgccgccggcctggccatgatcacagccagcggggtgactgtcaccagcaggtcagccacactgggcaaaatcccaaagtcatctgcactcgtcagtcggtctgctggtcggaagtcaagtatggatggggctcagaatcaggatgacgggtatctagccctaagctcccggacaaaccttcagtaccggagtttgccgaggcccagtaagtccaacagccggaacggggctgggaacaggtctagcaccagcagcatagattccaacattagcagcaagtccgcaggcctgccagtgcccaaactgagggagccttccaaaacagccctaggcagctctctaccaggtctggtcaaccaaacagataaggagaaaggcatctcatcagacaacgagagtgtggcttcctgtaactcggtgaaagtgaatccggcagcccagcctgtgtccagtccggctcagaccagtctccagcctggagccaagtacccagatgtggcctctcccacactccgcagactctttggtgggaagcctaccaagcaagtgcccatcgccacagctgaaaacatgaaaaattcggtggtcatctccaatcctcatgccaccatgactcagcaaggtaacctagactccccgtcaggcagtggcgtcctgagcagtgggagcagcagtcctctctacagcaagaatgtggacctcaaccagtctccgctagcctccagccccagctcagcccactcggccccttccaacagcctcacctggggcaccaacgccagcagctcctccgcagttagcaaggatggcctgggctttcagtctgtcagcagcctccacaccagctgtgagtccatcgacatctccctcagcagtggaggggtccccagccacaattcttccactggcctcatcgcctcctccaaggacgactccttgactccctttgtcagaactaacagtgtgaagaccacactgtcagaaagccctctctcttcccctgctgctagccctaagttctgcagaagtactctgcccaggaaacaggacagtgacccgcaccttgataggaacactttgcctaagaaaggactcaggtatactcccacctcccagcttcgcacgcaagaagatgcaaaagaatggttacggtcccattctgcaggaggccttcaggacaccgctgccaattcccccttttcctctggctccagcgtgacttctccctccggaacaagattcaacttttcccagcttgcgagtcccaccactgtcacccagatgagcttgtccaacccgaccatgctgaggactcacagcctctccaatgctgatgggcagtatgatccatacactgacagccgcttccggaatagctccatgtccctggatgagaagagcagaaccatgagccgttcaggctcattccgggatgggtttgaagaagttcatggatcctcactctccttggtttccagcacatcgtcagtttattctacaccagaagaaaaatgccagtcagagattcgcaagctgcggcgggaactggatgcctcccaggagaaagtttcagctttgaccacccagctgacagcaaatgctcaccttgtggctgcctttgaacagagtcttggtaacatgacaatcaggctccagagtctgaccatgacagctgagcagaaggattcagaactgaatgagttaagaaaaaccattgagctgctaaagaaacagaacgcagctgcccaggctgccattaatggagtaattaacacacctgagctcaactgcaaaggaaacggcactgcccagtctgcagacctccgcatccgcaggcagcactcctcagacagcgtctccagcatcaacagtgccaccagccactccagtgtgggcagcaacatagagagtgactcaaagaagaagaagaggaagaactggttacgcagctccttcaagcaagctttcgggaagaagaagtccccaaaatctgcgtcctctcattcagatattgaggagatgacggattcttctttgccttcctcaccaaagttaccrcacaatgggtccacaggttccaccccactgctgaggaattctcactccaactctctaatttcagaatgcatggatagtgaagctgagaccgtcatgcagctccgaaatgagttaagagacaaggagatgaagctgacrgatatccgcttagaagctctcagttctgcccaccagctggaccagctccgggaggccatgaacaggatgcagagtgaaatagagaagctgaaagctgagaatgatcggctgaagtcagagtctcaaggcagtggctgcagccgggctccttcccaagtgtccatctctgcctccccgaggcagtccatgggcctctcccagcacagcttgaacctcactgagtcaaccagcctggacatgttgctggatgacactggtgaatgctcggctcggaaggaaggaggcaggcatgttaagatagttgtcagctttcaggaggaaatgaagtggaaggaggattccagaccacatctctttcttattggctgcattggagttagtggcaagacgaagtgggatgtgctcgatggggtggttagacggctgttcaaagaatacatcattcatgtcgacccagtgagtcagctagggctgaattcagacagcgttcttggctacagcattggagaaatcaagcgcagcaacacttccgaaacaccggagctgcttccttgtggctatctggttggagagaacacgaccatctcagtgactgtgaaagggctcgcagaaaacagcctggactcactggtgtttgagtccttgattcccaagcccatcctgcagcgctacgtctccctcctgatagagcaccgtcggatcattctctctggccccagcggcactgggaaaacctacctggccaaccggctgtctgagtatatagtgcttcgagagggacgggagttgacagacggggttatcgccacctttaacgtggaccataagtccagcaaggaattgcgccagtacctgtccaaccttgctgaccagtgcaacagtgagaacaatgctgtggacatgcccctcgtcatcatcctggacaacctacaccacgtgagctctctgggcgagatcttcaatgggctgctcaactgcaagtaccacaaatgcccttacataattggcacaatgaaccaggctacctcttcgactcccaacctgcagcttcaccataacttcagatgggtgctttgtgccaaccacacggagcctgtgaagggtttccttggccgattcctgaggaggaagctcatggaaacagagatcagtgggcgggtgcgcaatatggagctggtaaaaatcattgactggattcccaaggtctggcatcacctcaaccgcttcctggaggctcacagttcctcggacgtcaccatcggcccccggctcttcctgtcatgccccatcgatgtggacggctcgagagtgtggttcaccgacttgtggaactattccattatcccctatctcctggaagccgtcagagaaggactccagctctatggaaggcgcgccccctgggaggatcctgccaagtgggtgatggacacatatccatgggcagccagcccacaacagcacgagtggcctcccctgctgcagttacggcctgaggatgtcggcttcgacggctactccatgcctcgggagggatcgacaagcaagcagatgccccccagtgatgctgaaggtgacccgctgatgaacatgctgatgaggctgcaggaggcagccaactactccagcccccagagctatgacagcgactccaacagcaacagccatcacgatgacatcttggactcctctttggagtccactctgtgacaggggcccggagcccagcgccctcctcttctcctcaccgcattccacctgcatcccccacatcaccctgaagatgacttcctgagccagcccccagccacagccttagagctgcgggaacaccgagaccccccgtccttcagcctcgacctgggtgcaggcatcccgggccagctgcctgcggaccgcttccttccacagcgagaactgcactaccttctgttgtactttaattattgttttgccttgttgctgtgacctccctaagacactgaagatacttctcgggaaaggatcatcgccgttgaaatgaaaaaaaaaaaaaaaaaaaaaaaaaaaaaaaaaaaaaagcatcctgccatgagcttcccagagacagaagagactggagcaaagtcggaaacacagagaagcacggcttcccctcagcacagaccctccagactgggtctcagagccgtgccacccaccctcccacacagccggccacagggagaactggtgctaaccagggtgcttgctttggtcacgttcaacgcactacagagctacgacacaggggaaccttaggagcaaataaaccgtgctttcatgttttttaaatggtgctttccttacccgagaggtattttgcctgttccaatcgaaccaccccattcaggtccatcagcctctgattaatatccgtgagagtgagtgacggagtgagagtgtgagcgagtggatgtggctgtcagtgcagaacagcatgtgtctctttccttctgatatatgaatgaatcaggttttttttttttttttctgcaaacactgtgtatagtgagacttgttctactttggagaacaggttaccttttgaaaatgaggttgagtttcttcctttctgatgcattgatttttgaagatttttttttcccccttcccctcttggtcagaatcaatcctttggtgaaagtaagaaccgcaggagttgagttttggtttggtcctgctcagttttggtttttagttgtccatcctcacagtcctacacactcgcctcctcctgctagggctgggggtatctgtgtcctttaaaatggatgaggacctggtcctcgacatgtgggtgagccatggaccttgccttcccttctcgtccttgagggtttagaacacacaccaacacctccagcgtccccgccccagcttccggtggggtgatgcggtcaccctgcaaaagacttgcactttcctcagaaccaacatgacgcagctcaataagggtgagggtcactccctcccagaagccccgtctggacgagccttgcctgacctcttcggtgctgaccttcccaaagtgatgccttactggttttgtactaactgtgttcattttacataagygtcgtgcctgcctggggtttgttttttttgtcattgttttccccattgaaacaaacagggctaaaaagtcatctgttcattaggagaactcaagttgctgtgacttttctcatccaaaagactcatttgtgtggatgcgtgaccatgggaaaaagaaaaaaaaaaaagatccattttttaggttcttttcggtctccagctggcaacccaactggacaatgatctgtctggtgcaggagaaggcaaaagtttctacaagtctacatgaccttgctgatacttgttctaatagaaacccagtctgctgtgtcttcaacatactggtattttcattacaaagtatggtaaatttttgagttgtttgtttctgttttgtaaagagaatccttattggacaccagtgaaggtgtctctgttttaatgatcagggtttttattccatcttttgcatttcttctatttctgaaggtttgtctcttggcatctttttttagtttcttaccataagagtttgacccgaaactgctcacttcacattggatgacaccatgttcttcctctttgaaaagaaaaggggaatgtgtcccactagtgaaaggaaaacttttcaacactatccctgctttagtctcagcaaactcagactattctgcttagccttcatyagtcatctgggtgtgagtgtgtcttgttctgtttttctttttaataaaacttttaaaccatatatttagcctgtgaccaggggggccaaaccctaagatttctggtaaacctgaagggtggccctcctcagacaatttatctcccagcaatgaccctactacactcgcgtactgtgaatttgggaggaggtaaagttgacttctcctcgtgggcagttttccaatcaccttgtgagtagacacctgccaatattgtttgaaacctttttttaatatgacatcctctcttgtcattctcttctcccctttcccacagacttccctcctgggtccaggttcagaaccaagacttctgtacctagtgctgcctgattggtgaacattgacttcaagtagcatagcccttgtgtgactcacaactccgtgtccttcctaaagtttcgggaagcagggttgtctaatatgcacatttcttattttggtcatatttttactttagtgtcactcaccttttacaaagtgactttgtactcatttagggctctatcggaaatgcttccattttgccttttctacagttaggccaattttgaaatatataaattctatgcaacatttatgttgagttaccaatggaagccaaaagttctcttcccaaactgccaagaatgatacaggccataattgaaatgggaataccttttaagtttcattaggggtggggtgggagtgggacaggaacaagacttgcctagatctttgttgtatcttggggacttttactttgttgtttgatgcttaaacttcaaaattctctgtattcaaatttgattgtggcgaatctacttcaaaaaggaaaaataatccaactttgtggatattaawtggaaggtttgctgttttgatctagttgtttccagtggagcagttttatgaaatatgttctataagatgtacattttttcattgtaacatagaaattgtaaataattgattaaagtgctgcattttgatgaattttttctagccatttttaaagagaaaactaggaattgagtattttgtgtacggtatgtttccatcctccctccccttcctcctcccctcctctctctctcttcctacctatttaattttcatttgtcatgaggtttttggatttgccaatgatctgctggacatcatgccccatgtcatagagaataaagctgatgattgtaccagtcttaaattattcatgattcaataaaattgatgcttatttattc

SEQ ID NO: 22568 - DNA, 1419 bp, Homo Sapiens
ttatatatgacgatctggttcttggaacgttcttgaagctagtgtctctaaggcaggtgtgtacagcaagacgtgaataacacagcaatcgatgatgaaagcattataagacaattgagtttgtcagaactacaaaatattgctgagtgtggattgctctgaaatctgaaaacattacttgtgaattgcttctatccaaaatgcagacacaatgctgggtattggtttacttgtttccgatttttcaaccctcttttccaggcaaaagagggttgtatccaaacgatacagacccacagagtctaacagatgtctctatattccttctcctcgaactctcagaggatccagaactgcagccggtcgtcgctgggctgttcctgtccatgtgcctggtcacggtgctggagaacctgctcatcatcctggccgtcagccctgactcccacctccacaccccatgtacttcttcctctccaacctgtccttgcctgacatcggtttcacctccacacggtccccaagatgattgtggacatccagtctcacagcagagtcatctcctatgcaggctgcctgactcagatgtctctctttgccatttttggaggcagggaagagagacatgctcctgagtgtgatggcctacgaccagtttgtagccatctgtcaccctccatatcgttcagccatcttgaacccgtgtttctgtggcttcctagatttgttgtccttgttttttttttctttttttttttttccctcagtcttttagactctcagctgcacaacttgattgccttacaaatgacctgcttcaaggatgtggaaattcctaatttcttctgggaaccttctgtgacaccttcaccaggaacatcaacatgtatttccctgctgccgtatttggttttcttcccatctcggggacccttttctcttactgtaaaattgtttcctccattctgagggtttcatcatcaggtgggaagtataaaccttcaccacctgtgggtctcacctgtcagttgtttgctgattttatggaacaggcgttggagggtacctcggttcagatgtgtcatcttccccgagaaagcgtgcagtggcctcagtgatgtacacggtggtcacccccatgctgaaccccttcatctacagcctgagaaacagggatatgaaaagtgtcctgcggcggccgcacagcagcgcagtctaatctcaatatcttcttatctgttccattccttttgtaggatgggttaaaaaaggcagcaaggtcaaataagaatgatatcacagggtgaacacccattgtgtcattacgagtaataccttcctaggatacagaatatactgtcacagagtacacacacatggggtacacccactgtgatattagaagcaatatctccctaa

SEQ ID NO: 22569 - DNA, 33963 bp, Homo Sapiens
cctccacccatccattggctagatccgccgcccgtcagacgagcccccggggcccgcccccagccctgagctgcgcctcttagctctggggccacagcgccagcgccactctgccaggctcccggccatcgcccgcctggtgcgccgcccgccagctctttgcccgcgcggggccgcccgccgcgggctcagggcagaccatgcgcccgccaagtccgctgcccgcccgctggctatgcgtgctggcaggcgccctcgcctgggcccttgggccggcggtgagtgttcgcccggccgcccagagtcccggcagcctgggggttgcggagggcgggggaggtgggggatggcgggagccgggccgtctgtgcgcgtgtctgtgtaagaggaataggggacatcaagcatctcgactcgcctcctcccaccgctccagaccgaacctagacgcgagggctgggatattggtcgtgcccagtccctcccagcgcagcccggagcaggcacagcatcagtggaggggcagcggggaagagtgggccccagacttgccttccttgtcgtggttgtgggtgcgcagcggggtggggcggccagtgggtgcagagtcaggtactgcggccgattgagatggaaggtttggtacaccgtaggtgagagggaggatgtgaggggccgttcttgtgtgctgtgaccgtctggaggtgcctgtgggctgtcagcatcagaaccagtgctgggggccccaggacttgagaaggggttcttgggatcaggtgagtgacaggcacatccctccgtgtgccctcccactgagcaaagcaaaaaggtaccagaccccaaggtggaagctggtgggcagtgaggggctaagggtggtggttaacaggaggggccaggcctgtacatggagagagctgagcagggagccaatgccaacaagcagtggcctccctcttcctcccacttctgcttcctctcaacgtgggtatgtgtatgcccttgatacatgtgtactcgtgtgccccatgtgtgggtgtgatatgtgtgcctgtggatggcttacctgggctgggaggcagatgctgattgaggcaggagatgcatggatcatctcactctagaacaggggagacctcagcactcattgagtctcctgaagcccattttacagatgggcaaagcgaggtccagagacacaagagccacatctgtctcccaccagttagacctagacagaggttgattttctccctaccccagactttgagtaatctagagttgctgcttaggcagggccttaaatgcccactccaagttggctgggggagggtgaggaatcttgattatctagttcattctctcccatggtcacttcccttaccatcacctccaccagagcaggtatctctgtgtttccatctagcggatgtcttgagcaccctgggaatgggaagctcattgcctgtcctaggagcggacctctgacaattggcaggagcctcacctccacccatgacagccatgagacccacctcctgagcactcaaaatcttaccaagctctgtcccagaggccacagctctggcacaacttgcatgaagccttcaggcctctccaaccaccatctggccctcccaaccccaggttcaagccactcaaactcttcttggatgaaccggggatcttgggaccactgttgtcaccccattcctccatcccgagaagcttctgagcccaggggcagagtggattcagagaggtctcctttcacaccaggccacttctacttcacacttcctgagacagcccaaatctgtctcctccctccaatgcctaccctccccctgtctttccacatcttattcgtttagtgcccaactctatctcctcctccagacagccttccctgattgctccagccaactcaacccttccccctctaaccccacccttcagccctacccacctcccaggctgggctattctggccatcctataaggtcaggggctggggtctcttacatccccatgtttcttacagcccagtgcaggggctgggtccacagagagaggagaagggactcaaccaggactgggtgagggcaggctggagtgaggggtccctatttccctccctgattctccctcctccccaccagctaccaatcgctccctcatggaatggggcaaacctgctctagccggactcggtgtgacggcggggtgggggggcggggtgacaggagttatcagagtcataaaatggcagctgcaaagttcaagttgaaggcccaaggccttatcactcctgtttatggtgtcctgacttcagcctgggaaggagaaatctctgaaaagggaggcaaaaaaaaaaaaaaaaaaaaaaaaggaaagaaaacctccagtgtctcagaggaggaagtctgccccaaggccacctgtcaagccttccactgcccctgccccccggacagcaggcacagggactcctcatccagaagcagagctgctcagggcaatgcccagtacgaggctgggggaggagggtcacaggcctcctcgtgggaaattctctatctggtgtgggagaccagacccagtgacttaggagaaagagtccaggtggatgtggggtacagcctcctagaactggggcaggggttgctgagaggaacagtcaggggaggctcctggaagaagcaggactgtgccctaaagagtttgaccagatgggccaatctttcaccctaaaccataaaacagcctctgttgacaggaccaatgggcctgcccccagaaggaggagtcccagggactgggagaggctcggcttctccccaactctgaggttgatcagtggccacaagctcctgaaggccttgccttgccaccggcatcctgctgcccctgccacctgcctctagcctctccagaggcggaccacagctgcccaggccctcttggcccccagcaggccaccctgtgagctttgggaaacatggctgcatctgggtcaggcctcctcctcaagtgaggttaccacctcagttaggcctggccagggctcccagggtaccatgctggaaaagcgagcccttttggaagtttctaccctcctgtcctggtgcactaagactatgccttctctgaggtttgtgggacatccttggggagcccaggctggaaacaggagagctggtcctcactccactccatggcaatggcttgaccttgggaacatctttaacttttgtggaagggcctcgggttcctcaccacaaaagggaaggtgagaggcctccgcccagtgtgcaggagaagtgggaggagagggttaggctggagccaactctgcctcctgagtgggacataatctacccctggagcaccagggtctctgtgaaagggggtttgtctttcaagcaggacttctgtgagctttgaaggaggtaaaggttgtgaaggtggctatgtgaactgtgtgactgtcatcccttctcctacgtccccagcttgggagccctgtgcaaacttatacagctatttctggcccccatcttcccacaggttcccagggcagcaggagtcctggggaatgggggacgtttcctcattaggtggccaaaacattttgggggtaaggctccaggcctaggtaggcaatggggcctctcagagcagatgggccttcacaacgtgggcagcctcagtggaaatccaacatgggccatgagaccagggtaggggctctaacctgccacgtgccacaactctgccattgctgggcccttcactgtggctcctttggccatggagcagggaatggggcctggggactatgtaaagcctagtccctttcttaaatccttctgttcaacccccagattctgccttcccctctctgacttcttaacacaaaatgatttttattgtacccattgaaaatgtcagtatgtactctctcacataacttagaagtatttcctttttttcttttttttctttttgagatggagtcttgctctgtcacccaggctggagtgtggtggtgtgatcttggctcactgcaacctccagcttccaggtttaagcgattcttctggctcagcctccctaggagctgagattacaggctcccgccaccatgcctggctaaattttgtatttttagtagagacagggtttcgccatgttggccaggctgctcttgaactcctggcttcaggtgatccacctgcctcagcctcccaaagtgcttggaattacaagcatgagtcaccacgcctggccccttagaagtatttctgaagaagaaaaaaacagtttaatctctccaccacgtgtatagtgttttaaatttttactttttttgtgaaaatttttaaacaagcagagacaacattataatgaacgtgcaaatacccaattccgaggtttgacaattgttaacatctaacaattaatatatgcttcatttgcttttgggctgaagtattttaaagtaaattataaacctcctgaccttttaccccaaatcatttcagaatgcatctctaaaaccaaaggacactcttctatataactatgatactgtcattacacacctaacaaaattgacaggaattgcttaatatctaatattcaaatatccccagccggaatgtaatgaagtgccacaggatgagtggtgatattatccagggcttggtcttctcgcaggagtttcatgtctgtgtctgacgggactgtccagcgagctggcagggagaaagcagggtgccttggcagtgagcctcaggctagcctccactgggaggacccagtcttttcgtgcagcccctctcatgcggcccattatctctcaggaagtgcctcctactacctaacttcaaaacaagttcttcctgcacagcaggtcaccagaggagggggaagaggccaccaaccaatctccatgtactaaggactcatagccttgtggctgcctgtgctggagtccagccctctgcaggtggctccaacaccaacgtcacccacaggcactgtgtttataagctgagtcctgcaaactccagttccctaggtgtggccaggatcgtgaacaagcagcagaggatttaaactaaatgcttagcctgtgttcctctgcaaataaaggcttcatgcccccaaaagaaaccttccaagaagaacccttagatgggaacaagctaagtgtctgtgcttgggttctgctaattatgagagcccttgtcctgatatcactctgagatgtggaaagttcttcttacccaaagcacaatcctgtatccctatgtctccccctcttcctccccatccccatcaacactcacacagcagttctcattctcttcttctaccagagctcagccttccccaagaggaagtgaggctggcaaaaaaaaaaaaaaaaaaaaaaaaagaatttgcagcggggaggctttgggctgttggctaagggatgtaaaaatacaaggaagagaaatcagtacggggcgaaggtaactggcagacttgagacctctggtgggtacggctggcacttgtcagtgggtaggaccttcagcctacctggggttatgcaaggcactacggctgtggctaggcttggatgtggacagcaggggcagcctggcatgaggactggactagagctttggcagtcgctgctaacccccctggtgcctggctggtgtcttttacatgtgaccctcaaccccaattctagaagtaggtggtattgttattgtccccattttatagatgaagttgagtaaattgcccaagtcatccagccaggaagcagcagacagtctcattctggaacctgtggtctgaactaggctctgccacctcgtgaagaggggctactacttccagggtgggcgacggcgtgtcacatgctgcgctgggactttagatatttttaaaattagtaaaatatagaaatctgaattgacagctcagtgaattgtcacatatgtgtacacctgtgtcaccactgcccaggtcaaactattatacattcccatcaccctagcaggctgccctgcaatgaggggaagtcttattttgatttcctttagtgctctctgcaaagctgggagcatgtttctcctttcttttgtgactcctggatcccatgatccaacttatgtcctttacccactccttttctgcccttcctcctcccaccttttctctcctctctcccctcttgcctcccaactacaagggctgcacgttctcgcccactcacgtgcaaaagccagcaaggatgggaaggtgagctgctgtcctgtgtgcctgtgatcacactgctttctctctggctcctccattccccctgtgtctcttttttaccccatgatttcagcagggggctggcagagtagagtaaataagtcgtgagatatgagatggtttctgtaaagggctagggtcatgtgggagagggtaaatgaaaccactcctgagccccctgtcctctactccccattcccctgcctccattaacagttgcaggctggaaaaaaataaaatagccctcttgacaaacctcagaagcacaaatcatccatggaggctctgcatgcttggcaatttgcagacagttctttctcctgcctcaccttatccagcctgctgcattctgtgctcctctcagagaccagcttctcctcggagggactcatgcttcctgctgtgctacttggctcctcctgccctagttctctggccccagatgatgaggctggggcttctgattcgaggcagtagctgtggtctcaggcttcccttgaggggattgaacatggcctacgaacctgagcatggcccaccctgtctttcagagccccttgcatctaacagctacaactcccagcatcttcacccatacccccatcaccacacctagcctttgctccagatctcagagaaccccacatggacaggaaaaagcagggctttctctctagcccctcaccaattcctatgcttgactgagctccaaaaagtaagcttaaaggcagcctgaccctgccgttgagctgaggctagagagttttggtccaggctgggctctcagcaccttctttggggcaggagttcctaagcccagaagggacccaggctgaagaagactgaagaagtccacagcatcttctccatcctggtcttcttctgtcctctgccatggggctagcgggatgtgggaggtgaatgacagggagttggcaggagaatcctgagtctagttggagacagggactaaccaagtcttgttcattccacctgccccctcctctctgtgccctctctttatacccactgtcctgcccaggcttcatcagttcctgcctggactggtgcagtagctttcagccccaccacctgcaacctgagggatctttgtaaaatgtgtatcccccatcctcagtctcctgcttcaagtctctgttggcccccatggcctaggagtgaaagctcacacttgaaaactggcattccaggcccttcccaatcctaccccagtctacatctctcaacttgtctcctgatgcccccagaactccttgctgcagctacaccaggcttctcacagccttgcatgtattaggcattttcatgcctccatgcctgtgcacacgctgctctactttctggggtgctcttactccacttctaattgtctaacttgcacatcctccatgacctacctctacagaatgagtacagcatacccattctgtaggaagcccagactccagctatatcccaccctggaacacttccctgacatcagtagacttggctatattcagccagggaatttttcaactctctctgtgttcctgaagtccagagggataatgaggatgtttagaatagggaaataaataagtgggagaggaagtccaaagtctgcctgaattccttagtgataaggactagagggagctgccctggcccggtccctcaaagggcaatggttgaccagagggtccaaggcgaggctgtgttgaaggattgatgcagtccagaccagcggtcagagacttaggtcccatctgggaatgcgcatttgctgggtgacctcaggtccctctttgggtctccatttcctctacccctccccagatagggctcaacactaaactaaattgtgacaaagagagagctcatcttccagaccacacccactgtttcataaacaccacaggcttcggtacccacccctcctttctctccaaactgcctctaaggaagggctgtgtgtctgtgctgctgagggggcagagttggctggagaagttgacccaacactcttctaccctcagagagtcgcaagcagaagctgccagaaatcctaggcgcccatggtgattgggaaacaaatatttcttggcaaactatatggccacagtcctggcttaagaaggcccagaaagtgagggcgtccattatcttgtcctcagagggcaaggctggacacttttgtttacagcgaccaacagaaaactcaactgatccaagccataaaggaaaggcatcagctcatgttgctagcagtagagctggtttcaggcatggctgcattcacagacccagacaatattaagagaacctgatttttctccatctctctattctgccttcagctgtatagtttttatccgtgtgttccacttgtcaacaagaagacagcagaagcttgagcccttgcttcctttaaggtttccagtccagtggggaaaaaccaaattcactttcttaatcacttaatccaaagtcccaggagtgagcctcctggctctgagtagcctgactcaggccatgtgtcaggcactgtggccaggaatgctctgatggacttaagccttggtcacatgtcaatcccctggaagagggttcttcagaactccatgaactagaggtagggaaggaggttgtttcccagacacagatgaggacatggcaccagaagagagtaaaggatggtggaaggcagaaacaagagatatctgctaccatccatcctgttttgacgttacagtgttatgagaggtgagaatggacaggagaatcaggagacgctgggaaggggccagaaagcagaaagaaccctgttgctggtgggagatggggttgggatggtaccttggtgagaaatgtgctccaagacaggcgagacagaccaatgatgggacacaaggcagggtagccagtacccagattcctcttccagaagccacctctgagatcttcctggccactattccccctatacttgaggatgaaacagccacaaatcccttgagacagagtgtcttgagcatttcagcctgagtaacccttatgggaaggagagaaagcacatgaccccaaagaggaaccacagacagtttccttgaagtctcctatcttttaacagttatacgagtaactgtatcatgctccatcacacaactgtgttactttcaataagttttaaatgacttaccagctaatgtctttacccccattggctggtaaaggtgcaagatggagctcgtgctcactgtggcttccagggcaacagcacttaggcaggtgaggtctggatgctggggaaatctaaaggagtcctggagagggaggccttccctggacctggacgaggtcaaccatggtgctagctgcttctgggagtgttggcctgcaggtgacctgtgagacagaggctccaccagagagccctcaacaggaatgagagagctgtttggggtggaaaggacttggctgtgcagcttcttaggcactgagttgttcagcttcagcttggacccctctccctccgcagcaatggattgctggctgccagctgggatgcacatcccagtaaatggagctgatttacttaaaacaatggtcaaagtactaagcactttggtgcctgcaggccaggagggacccccttaaaggaaggtcccccacctatgttcttcccacggacccacttcaagaatctctaagtcggcaggggaggtggttgaggcccacgtagcctacagagaaactgaggcccagggaggtaaggaccctgtcccagggtgggagggacaagctggaggagacactgagaatgtctgattctggagtggtcttgctggactctcttctatggccctggtggaaactgacattcttctcccaggcagagatgaggaaactggtgtggggttgccggggccagcaaccacttttctaaagccaaagacgcagaaggtgctgccagtccaacgcttcctccatggaggccttcacccacccacacccatctaagagttcccaagacctgttttttctggctattcctagacagccatcacccccactcacatgtcttccacaaggtcagtgaccccagtcacactggtctggcccacccctgatccctggccagggtacagggaggggaagaggagaagcttggacttttccatcccttctcttcaccttccagaagcaggggaggcctggtgggatcctagaggggctctcttacttccttaaacctccccaccctcagtagatctggtatagcttgaattatttagaaactaaaaaggaggcaggtgaggtctgggcaaggaaggccagagtcccctccctagcctggtgacccaggggactgagcacagaatcctggaatgacagaagctggaaaatacagctagactcctggattcttcccagggctggccctgggaaccagaggccaggatccaactccacataacagagtagtagcacgagctggccccactcatcagggagatcaagacagggacagactctcaaaccaagctggagagtggcagagtccagagggccagctcaggcctctaaggggaggccctcttgccgccatctggagttgtgccacccgcaaaaagacaaagcagttacagctgcagcactaatgggggagccatcaagaagctgtggcagggtcctcggggccgacccaggtttgggggcaatggacaacaggttggggtcaggttcaggtttcagtcttgggttggtattggggttccatctggaacttggatctcttccagggagagggcaggtgcagtccagagactgggcctggtgctcctgagtctatggacgaggctgatgggccctccctgtctttgttctcagggcggccaggcggccaggctgcaggaggagtgtgactatgtgcagatgatcgaggtgcagcacaagcagtgcctggaggaggcccagctggagaatgagacaataggtgaggcccccatgggcagagaggggctgcatgcccccagggagcccaagattcctcatgtctcaagctgagatccaagtcacgttcgttccacatttattggatgatggtgaggagcggctggggagccagatggaagaagaaaggggctaacaggcttccacattcccaccccaggtctggggagctcccagccgcagctaaggaggacatactaaattggggttctgaaaagtacatggagccaactctgcctctgggggtccctatccctcttctccaggaaaagtgaagatctccatggcggccagcccacccaggacacaaggcccagggtgctatgtggtgggggatctgtgaccaatgagggcaggcaggttccaggaccccctggagctggcatgggagaattagccccataacaccacactccaggattagaacattgtactgttagcatctccagaggaagaagaggcacattcagtcacaatatgtgacccccacagggaccacatggaagctcaaagccatcttagtggtcccgagcaagaaggggcacaagttttgtctggaaagatgtggaatactcaccacagccaatattcagcctggaaactgaggcccactcctccctctcaaccccaggctctgcctctgctacatccagaggaccgatagtgacaccacacacacacacacacacacacacacacacacatacacacacgcccagcccctaagcatacacatacaggcaaacacactggcctctccatcccaacccacccttagtggccagatgaaccatcagctcattattcggctgatgagacaagtcaaggtcagccccaggggctgagcacatgagggccccagccactcctcctcagggggctgggagagccccacctggcagtgtgaagggtagtgcccagctaccaagactggacagcagggctatcaggacagatgacagcaccctccttttgactcagcagccccaggtaagaatggatggaattctttggtaccacttgaaccagacttggaggggtgagcaggtttggagaaacagagagtctgggaaggtgggaggcactgaggcagacttcccatggggagtggggcatggttggcaggttcaagtcttactgccagggacaccagcctggcatgtctgggctggaggcatgagatggctgggcccgttctgggcctccatcccaggccatctccccgcggctgagcttacagttatgtaacagccttgctcaggagcagggagcatctttacgtcttcctggctccctagttccccttccacctctctaaagctgacagttatgtaaccccttctgggtccctcttcttggccctggtgcccaggctgtctgcctcctgttctgtaagtgagtatgtgtagcctcacagatgggctttgcctacccttgtctcaaagcaggacaaccccttgactctagggcccagagactgaggcatgggtcacggggtgactgggcctgcccactacctacaggccccaccccactccaccagtgcagggagccaggaccaggtgcagacaggctttggcaggccccagcggtgggatcataggcagccccaagaggcccagactctagactccactgcgcacctcccacgcctggggacaggccaccctcgtgattccaatgaggtcactgctggcacagcgttcccgtcgggtgccaacaccctgtcaccagcagccaggctgggatgcagagaagggccagcataggttgtggccatgggtctgcccgtgaccttctgtagggctctgtgcgtgttcatgcacatctaggtatgcgctcctggcccatgtctgtctggagctgcgtctgtgcctctggggtctatagctctgtgtctgactctgagtatctttgtgagtcagaagtgtgtgtctatttaagcttgggcacatgccatctcgacatgcctagatgtgtctgcccagtgtgctgtgtctctgtgtgttggcttgtatgtctatcagtgtgaatgtcagtgatacacccagacatgtctgtctctctgaatgtatgtctctgtgagttgtgtgtctctctgtgcccatttgcttgtgtctgtggtctgtgttcaggtaagtgtacatgtgtgcatgtttgcatgtgtgcctggtgttctgtgtactggcatgtacatgtcagtgtgtgtatctctgtgtgcacacaagtctacaaaatgacacagcagaggccccacctcatcttgcctcaccatcccttaccccaagctctgggttgggctttcctgctgagggcacagccccacctgtgggcacacacagccagcctgggccctgtatttctgtaggcctggtgacatgtgtgatgggacctatggggcctcattagggcaggcacacaggaaatactcccgttgcctagcccaggacaacaggccattccaggtaccaagtatattcatggctgtcaccccgtcccctgcttccctgaccatgtccctcatattggcctctcatcctgctcccctgccctgctggctgccctacaccccagcaccagttcacagcccagccttggttatgctgagattccttgaggccaagtgtggcctcccaagggcagggcctggtttcctctcttctgtcccactgcagtgaagcagagctcagggccagagacccagccccggattcactccctggcctgtgctggcagccggaggtttagagagcccaaagtctggcagggactcagacacaatagccggcctacaaaacagggcgtgcccagtgctgtcagagaggggtaaacaaagtccagcagcagcaaaattcccagagaaatgacaggccttccaaccaagaggagtgggaatagactgtaccgcttaccagcaacatgaccttgagctggttttctaatcagtctgtgcctccatttcctcatctgtgaaatggaagcattaaataagttattcatccaaagaggttagaacagtgcctggcacatgcaaatgttatatgaatgtttgctgatattcttaacagggtcttgaacccccagcagggtttgactgacctgaagtgcccctactcagctttcagagaagctggcccagaatggaagagggactgacagccaacatgaggccacaagagccctcaagacaggttgggggaaaagtggtcagggtccatgaccaaggaaggctgcaatctctggccaagccctagggatccaggtgtcctcctcagccttcagctatagatgtggcctgactgctgcagccccagaaagtgccccttgctgctgccagcccactccaatgcacacagtcccgaggctcttccccaagtaaacacatccctccacctcctcttcccagacccccttcttgggaacttgtgaaccttcggacctgagctgggctgggctgggcttggcccagctggcgttgactttggctcaggggttgggttttctgagcaaatctatgggactggcaggattgcaaagagacaattaagcctcctgcatgggatgggtccagagcagtcctagtccctcacgggcatgaagcttctgaacagactaaatgatggcatttgcatgtgcctattcaagcagacccctagagaccacactgtgcatctttcactggccaggctctgcaaggctgtggcggagaatgcagccacaatgcagggttttcgctgcacttgttccctaactattcccctccatcacaattcacaatccgaccacgttgggggaatctgtgttgttcaagaactaggtgcgggctgggcacggtggctcatgcctgtaatcccagcactttgggaggctgagaggcaggtgaatcacctggggtcaggagttcgagaccagcctggccaacatggcgaaaccccgtctctactaaaaatacaaaaattagccgggtgtggtggtgggctcctgtaatcccagctactcagaaggctgaggcaggagaatcactttaacctgggaggtggaggttgcagtgagccgagatcatgccattgtactccagcctgggcgacagagcaagactatgatggggtgatgagtatattgggatgcatctagttcttttttttttgagacagagtctcaaaacattttctaatgcctccttcactatcataatatgaaattcaggacacgtacccatccactttataaaaaataatgttctagctatactgtaaaataaatattaaaaggaaagtaatttacaataaagtaccatgtacatattcaagcataaccacactagatgtagtctgaaggttgtacctacaaatataaatcctgggaatgtgaggcctacaaatgcagactgatggacacaggtagttgtatcggtgactcaagtatcacaggcagcactgctatgggtatcatgattttccaaaacattgaacaactcttagtgaagttcagaacaaaacaaaatacaatcttccctcccttttctcagtggctgcattcctggaaaactccatgtatgttaaacttgtgcaataaacagcttgtgttggccgggcgcggtggctcatacctgtaatcccagcactttgggaggccaaggtgggaggatcacttgaggtcaggagttcgagatcagcctggccaacatggtgaaaccctgtctctactaaaaatacaaaaattagccgggcgtggcagcatgggcctatagtcccagctactcgggaggctgaggcaggagaattgcttgaacccaggaggcagaggttgccaaggttgcaccactgcactctagcctgggtgacagagtgagactccatctcaaaaaataagtaagtaaataaataataaagtaaatggcgtgtgtttatacataaaatggtgtaagagtctaggctctggtcattatgaaaggttttcacctatacatatgcccagtggctcatctggaagccatgcagaatgtgagacaattcatcattgtgcaggagttgtctgtctggcatccctggtgactgcccatcaaatgccagtgaggcccccctattgctgcaacaatcaaaaccaccactggcattggaaacatccccagggggcgctccatccctcactaaggaccaaggaactgtagtcaggcctccttcctgcctccctgtcaggacagccccgtgcaacctccgcagggctgtgcctcccctctcagactggaggctccttgaggtgggagcctggcagagggaggaagagagtgggtgcctatggcctcaggccccagggctggaggcacctgcactgtgctcacccatgtgtcttctgccttacccccataggctgcagcaagatgtgggacaacctcacctgctggccagccacccctcggggccaggtagttgtcttggcctgtcccctcatcttcaagctcttctcctccattcaaggtaagacccctgggttgaagaggtgatgtgagtggggccggctggagtggggactcacctgtcaaggaagtggaaaggcaaaggaaagtggtcaaagaggctggagcaatccgagggactccctggcagaggaggcaatggtgctgggtctttaaagaactcacaggatttgattagctcttcacataaagataagcatgtgggaaaggctcactaaatatttgctcaacaattgataactgattgactgacaggtacttgattaaattatgactcccatagtcctgttgtcttgggctggtcttgattcagtctttcgatgcctggagcctatgacctcttgggctccatgaagccaccacatgactttgcttacacaccttgtcatgttccacttaaatgaatgtccacagaatgaggcagaaaagaaaagggggagcccctttaggaggtggctttctagctagtgagtcattaaagagattcacaatatagattcagtcattcttttgtgcagtgaatgaagcacttaccagtgtgccaggcactgagctggacaaacacagtggagagaggataaaacagcccccggggctgctctcccagagctagcattctcattggagagacatttagtaaggaaataaacagatgtatcatcaataataaaaagtgctggacgagagaataaggagagtggggactaacttaaggcagaggttcacaaacagcccctctctgaggaggtgacacttcatctgcaatctgaagacctggaggtgagaaagaaccaccaggcaaagatcccagattggggacaactgagagagagaatcaacagcccgtggaacaagcatccaaggaagttccgtgaaggccagtgtggctggagcagggaaagcaccagggatgaagggaggggagggacaggtgcgccgaggccagaccatgcagggccttgaggacagaagcgaagacttgagttttttcctaagtccagttagaagtggggggttttaagcaggggactgacaaagtccaatttagatttttaacgtctaactggtttctgtgagaaggaagaattctaggagtgtaaacaggaaaacccaatcacaaggcaggcaggaaatgatggcttgaattcaggtagtgagctcagtgcgggagagaagtgggagagttgtttatggagggaatgggagtgagtgaggcgagggaggaatcaagcaggccccaccctaggcttaggtttaatgagccttagggaagagagtgggactgggtggggagcatggagggaggggcaggcctagagtggggaggactcatgaggagcagaacttatataattattcagagagcgaacagaactcaggcatctctcactccagatggccttttcctccctggaccccagtttccccgtttgtaaagtggggataggtggtagaccccagggtctctttggggtaagccagtttgccccccagtgcctgctgttgtgacctcagtagtgaaagacagaacttgaagccctcctgaggagtctgggagggtcacagccatgccatattccaggccagtgcccacctagcctggtcacctcctccagggacacccagtgcctgggcagataagagatgagttcctctggcaggtttcacagtgcacgccatcaccaagcctggaaactagccttctctctgatccctggaagcacctgctaattgcctttctccctgagactctgctaactgcattcctccccatggctcttccttctgtccctgctggaatgtgtcaaggcaactcctgcccttgagaacctggactccagcccaccatctagctaaccctgaggctgccgccatcaatggggcccatacggtgcctttggactgacaagaaaaaggcagtccttcctcgggcagagatgacctctcactagagcccacctagtgacaagcagaatatgcctaccggccaggtgcccttgtagagtgaacaacttgcacagccatactctgtgggcctggtctctgaaaatggtggagagaaataagagactgcgattagggactgaaaacagaaaaaagacagtgttctcctgagcaagtagatgaagaagttgtgggcaaccgacctgaaattccaaagagggaagtttgcaagtgtgaggcaggaatgatggcatcaccaactcacacaacaggcctgggaagaattatacccacgggaagggacctggttatacagggaaagctaaataaaccttatagaagataaaaattgtggagagttagaaaaaagtcatctacctagactggataaaatacctgaaggagggagtttggccaggcaaggaattgctcattaacacatcaaaatgttcatggtagctcacttctttatttttattttattaatgttttgagatagagtcttgctctgtcacccaggctgcagtgcagtggcaccatcttggctcactgcaacctccgtctcctgggttcaagcaattctcctgcctcagcctcccaagaagctaagattgcaggcaccagccaccacacctggctaatttttgtatttttagtagagacagggtttcactgtattggccaggctggtcttgaactcctgacctcatgatcctcccacctcagcctcccaaagtgctgggattacaggtgcatacttctttaatctgtagtctgcatatctttcatctgtgtttctaccttcaaatatatatatatatatatatatttttttttttttttttttttagacagcgtctcgctctgtcccccaggctggagtgcagtggcactatctctgctcactgcaacctccgccttccgggtccacaccattctcctgcctcagcctccccagtagctgggactgcaggcgcccgccaccacacctaattttttgtattcttagtagagatggggttttaccatgttagccaggatggtctcgatctcctgaccttgtgatccacctgcctcggcctcccaaagtgctgggattataggcatgaaccaccatgcctggcctctactttcaaatatttgaaaagatttgttttaaaataaatatgggagagccattctggctgagaaaattcgacatacagtctatgttaaccatgtctgtggggtctatgggatacctcccctcccctaccacctgcatcatgatgctataaataagaaaaccttgctgccagcctaggaagctcaaacttgctggctgggatgggacaccacggcagggaatcagcaggagagttccatggtcaggtctgggtgttagcatgatccttccagctgtctcagggtggggagctgacaggaaagcagggggctcctacctaatccaggggagatgaggtggtggtggtgctggggaagaagctgggacaggactggtgactgatgggggagaggagggagaggattattcctcaattcctggctccaggcactgagtggaggatcctagctaggcacaagcgggggccatgactgctttttgagacatagtgagtgggaggagactggaagaaaggtggcccttgccacccttctggtcgtcatggctatcctgagcttgttcaggtgaagcccagcccaagtgacaggcctcaaagcagacctggcaagtgtccctcccacggtggagcccagcctggcccaggcatgccctgaccccttcactgttgcatgccctgaccccccccccagtggagtgtccttcccagcacagggttaaagtcccttgctacctccctcctgcccttcatgtccccctctacagatattgggcctgccggtttccaggcccagactggagggagactcttggctgcttcttgggatcccatggtgactgccattttgatatccttgagagcagcttgctatgaggccttgaccacaatcccagggctcttcaaagagaccacctggccccagagatgacccattgtcccctcccctcctctccttcaccatctatggcagccagggctccagaaaacagagtatccctttggccgctgctgggagcccagaaagatctggagtcaggcagaccttggtctgcatcccacctgctgctcccttgctgtgtgaccatgggcaaatgacttaacctctcttagccttgggatccccattttttgatgggataacaaaaactaccaattcctagccctaacacattaatgtttaccctaacacctccgccactacacacacacacacacacacacacacacacacggcatgtgaagctgctgtgtacatgccagagtcacccaggtttgctggcataattcatgataccagatgcttgccatgtcattgggcctggcctcctcaagccccggtccctctggtgagtagggagcccaaagctccagtgtcccagcttcaaggctgggtgattttggccttaatcctcttttttttttccctgagtcggagttttactctgtcacccaggtgggagtgcagtggtgtgatctcggctcactgcaacctccacctcctgggttcaagcgattctcctgcctcagccgcctgagtagctgggactacaggtgtgtgccaccactcccagataatttttgtatttttagtaaagacagggtttcactatgttggccaggctgatcttgaactctgacctcgtgatctgcctgccttggcctaccaaactgctgggattacaggcatgagccaccgcacccagcccttaaccctgttttctacctgcctgagccttgtagggggaagtcctcaaatgaatcagattgtgggtaggatccagggcctcagagcctgcagttagctccctggaactggggctgaggaagagcctaccctttgatgaggggctgggctgaaggctctgggccaggcccacctctggctgcaatgatgggaagctgagaggggcgcagaaggacagctgaaggcttttctgctgtcctaggagcctcttgcaacagtgaggttgggagcccagggcagaaaaagggatgccaaggcaggaaactggcccagtccaatgccccctcctcaaccaaatccatcctgccctccctgggccatgcggtggaaatagacccagcccacggctgctctttcctggctgtcccatccccacccctagctgtccctcagttcttcatccatgaagtagggtgacaagacctctttccaagggttgccaggaggatttacagaaatggtgaatatggaatcacctggtatattccgggcatacagcaaagtttggaaataaacacacgtgcccagtgacacttcctgagctcatagaacagcttgaccctcctgcagctctttatctggtcaccgaaataagtcctcaggtcacctccatgcaggtgagaaccaagcttacctgggaagactctggagaccaaatcagctctatcctgtcctctctatgtagccttgggcaagtaaccaacctcttggggcctccacttctcaactgtgaaatggagttaacttcctcactggatgattgaggaaattaaacaggatgtgcctaaagtgcttgaccagcactgacatttgaaaagtactcaaaacctgtcattgtgatgaggctgacaacagtgatgctgctgatgctgctcatggtgactatggcggtggtggtggtggtgatgaacgggtactgagatggggaagcgtgattcttctctggctcatctaatttctattcaacccatcctctccctctctggggagaggacacctccccagtgctggagagtggggagcctcagtggtacccctcacctcacataccccctaagcggtcctgtctctttgctgcagcttcaagcctctgaggacagtggacagtgcagcttgcctggagcctcagcctctgcttgtttcagccccaagctcctgccatgctgtgctgcctgattccccctcacatgcctttgcctgcacaggttccccaaccccacccctcctcacccccacactcctgctccccctccagcagcacatctaagcccttccaggtgtgagaagaaacccagccccacaggcccaggcaggctgactgaggaggaccgggcaggcctgggccccttcccccagccgtggccttgtgacaagggtcagcattctgctcacggcaagggtcaggaatcattctgtgacaaggatccaggcagggtctgtgacaaggataagagtgtatgttgtacttggggtcaggttcagaccataacaaaagggctgagcccaagaatgtctgctctgattctatcatcggtgcgggagccctgaagaggcttctccctgccccaggtgcccccacggtgccctgggtaactgggtcagggcagctggaacctgacagcaccagggttggtgggagtagggctgaattctctgccttgttccaagcagagacagccaggtccccatgctcccggcctcagcctttgtccttgcccctgccctccacccaggccgcaatgtaagccgcagctgcaccgacgaaggctggacgcacctggagcctggcccgtaccccattgcctgtggtttggatgacaaggcagcgagtttggatgaggtgggtctcagggcacccccacctcacctgcagagcgccggggcccacctaggagactttgatctctcccaccgaggggtgtggttgctgtctgtgtgggaacaggactcctggagtctgccctcctctagcctcctccaggcctgcctttctggggtcccaacccttggctccccctgacagggtatgggaggaggctttcccacaggaggggcccccagagcagcaaaagctgaagcagctcccccaggctgggccaccctactgcctcatgggagcctcacttcagcccgggagttggcagggcaggcagacaccagcaccccatcccatccagaggggaaaccgagttgctgcaggtcctggaaggaaccagacttggctaccaaatagccagtcaggaacagggacagagcctgtcattctcagtcccaggacagatatcttccccggagcagttaaaacatggtctctgtaaagactggggagcctggtaaggacattgatggggaggctggagtcctcagctaggagcccctcactgctttggggtgcaaatgcatgtgtgtgtgtctgtctgcgatggcatctgccccaccctcaggcgcccttctcagaccgggctttcactccacccacccccgaggacagcaatttcttcagaggcctttgaagcccactggagctataggccctcattcccccttaaccacttgcctctcctcaggcaagcgtgggaggctgacaggaaggagtggcttgcctagtggctgtcgtgctgcactgcacctgtgtccatggggagggcatcaggagaggggaccaagcgagacaccctcggggcctagctttgccctcctccaccggaaaggccagactgccctcatcccaccgaccccaactcccaagggcccaaaatgggacatactagtgccagtgtcttcttcgacatcctgcaacctcgcatacctctcctccctatacagagacagggcctcgaggggtgtctgaagggcaagcagaccccacccctagggtgcccagctcagagctggcacagaagggaagccgggcacatggctggagacatgaaattaacaaaagggacgtgcaaggtcttcattctctccctcaccaacttgtccctcgtaaagaagcaaagacaggaagtacattcaacccccaccccaccctaagacacagtcctgccctgtctgtagaaaccagggcgttaggggtcaggggctcagctgctcttgggagccccagacctcagcctcctcatttgctgaggcagggttgggcaggcagagtgtgtagggcaccccacccctgccaataccccctagatgagcctcccaccccaccacccaagagcctctccctgtccctccaacagcagcagaccatgttctacggttctgtgaagaccggctacaccattggctacggcctgtccctcgccacccttctggtcgccacagctatcctgagcctgttcaggtgaggcccagcccaagtcacaggcctcaaagcaaacctggcaagtgtccctcccacagtggagcccagcgtggcccaggcgtgccccgacccctccactgttgccccccagcagcacatactccccagctcctgccaggccagcttcccctggagaaggcaggtggctgagctcttccatgtgttgcagcctagtctcccctaggatggccctgcacctggggacagggcaccagagagtggggcctgcacacaggaatgaggcttctggggccacacacgaggttgaggcccttgggagcccagttgcacaggtggatggggtacctgggggtggggctcgtatttcaggatgggatcccctttgaggcggggcctgccctctggaggacacatgctcccctgccccacccttgctcagcacataggacagcattggctggggtggggatccaaggcccctttggcctcccagatctgcccaccccacacaggaagctccactgcacgcggaactacatccacatgcacctcttcatatccttcatcctgagggctgccgctgtcttcatcaaagacttggccctcttcgacagcggggagtcggaccagtgctccgagggctcggtgaggatcctggccctggcccacctccctcagtctcgccgttatctttaaccactgtaatctcctcttctccccctgcttctccctctccctcctccctcttccctcccaccccacccctcaatccaaggatagcctaacccccacccaaccccacctggcagtactcaaatcacactcccctccggcaacaggagatgttgctcacccatctgggtgctcacagacctgccgccgccagtgagaaaagcagatgggaaatgggacacttcatggccacagcccagagcacctgtcccacctgttgctaacttcctatgtggccttggggaacttacagcctcagtttccccatctgtgcaaggaattccaagattccttccaactctgccatctgccacctgcatagccagggctctgctcaccatgccacttttcctactccccccgtccccgtgccatctggagtgggtccatacatatgcagtcctcctcttttgttctgatcctgacagcaggctggttctgggccttcctagggaagagaggtaaagggatcatctaaggaattcattgccagtcactaagggggccatctccaagggattcttagggaccctctctgagtgccccaagctttgacagagagcttgagatcagccccagcccccactcattccttgtggtcagtaactcattgcttcatgcatgaccccagaggcagtgcattatatcaggggtcagcagtaccttctccccaaagagtgaaatgatcatactggaatctcaggcatttcaacaagggggagagaaaacctaggggacccactttggccattcccagagcttctcagaggttctgtcccaggagctgtgaggccaagtcagacatgagcattgtgagccacaggacctgtggaggaacctgctgcctcctgtgcacatgttacggataattatggagactggcttcccaattcattactgcgaagcttttctaagactaggaagaagcacagataactgtcctggtaaagagctgagttatggccagacgcggattatggctcacgcctgtaatcccagcacttctggaggctgagttgggcggatcatgaggtcaggagttcaagaccagcctgaccaacatggtgaaacccagtctctactaaaaatacaaaaataaaaaaaattagctgagtgtggtggtcagcacctgtaatcccagctactcagaaggctgaggcagaataatcgtttgaaccaaggaggcagaggttgcaatgagccgagatcatgccattgcactccagcctaggtgacagagcaagactccatctcaaaaaaaaaaaaaaaaaaaaaaaagagttattctccaaaagcaaatgggaggaagatggggaggcaagaactcctgtaactggagggactgaagccagacctgaggaaggactttccaaccaaagggagtggtgggggcagggggaggcttctctctgaggatgtcgcaaaccaagggtacaggaaggaagggtgggaaccaatgttttgggtacagggggaagtggaagccagacagtttcctggtggagggtggctttaagccctggctgacagacatctaggcttgatctgaaatgggggactttctgggaggggacagaaggcccagaataccttccagtcatgccaagtgggccacccagagccctgtgattgctctactcatgggtctccctaactccttcatggtcctcgtctgcctaagaaacccattcttccactcggtcctctgaaccccaggaggaatggccacccctcccctcttctcttcttcttcatttctacttccccctcttccaccctcttctcagtcccagtctccctccacacttccatctgggccccactccacagtccacagccctccactctcccacattgagcagactcttgcaaactcaagcaagaattctccctcataccttccagctaccttcaatacaaattggcattagatgaatgagtgggtggggtgggagtgtggatgggcaggttggtggatggctaagtaggcagcaggataaatgggttaagtaaggaagattggacagatgacaggcagaggggcaggtaggtagatatgtgggtggatgcacaagtggattgatgggtgggtgcagagatgaatggatgggtagatgactgagtgggttggtagaagaatggagagataggtgtgtgggtggatggattgatagatgggaagatgatagatgatggatggacacatggataaaaaatggataaatgagtgagttgatagtgaatgtctagtgggtgagtgggtaaataaatggatacatggataggtgggtagatgattgaatgggcagatgggtagatatatagatgggaaggtgaatagatgaattgatggatggataattaaaatcaccagtttatcccgaagtatcagaggatctaaaattagggaaaatgggaaaaccaatgagtacatttttaaggggataatgcaaaacaacaaagagattaagttggctgcactgcaactgtgtttgtccccccagacacgagtgtgggcagtcaaggacccttgacagccccagtgaaccccgtcttttctcctccccctgcaggtgggctgtaaggcagccatggtctttttccaatattgtgtcatggctaacttcttctggctgctggtggagggcctctacctgtacaccctgcttgccgtctccttcttctctgagcggaagtacttctgggggtacatactcatcggctggggtatggtaccagggagggcttccaggctggggacagagggggcaaggcctggagaactccctagggggagggtgccaacccagcttgcagtcctacgtcttgcttagctgcaggtcctgcctgcaaggatatcagccaagggtcaagaaagtcctcaaaatgtctgatcccaggacaagtccctcaggttgcagctgcacctagggctgacctgtgggacagattttgtgaacatctttccatttccctttagttcccgaaatacacagggccactgctaatctataaagggcctctgtcacaattagaaagagaatgtccgtctaggtagacacagcccttcaggcatacagcttcaccccctcagtggagcatccctccgtggtgaacaacctatgcaaccaaagacagcagactgacaacccacccttttctctctccctccctctccctgcttttctccaaaatctctccctcatgccctctacccctgcttcctgtgccctctctgctctttcactctccctgggcctgacaggggtacccagcacattcaccatggtgtggaccatcgccaggatccattttgaggattatgggtgagctgctgccccacacactcccccggccgccatcacttgggcaggccccctgggtgggatgataatgccatctggccttggtgagtggacaaaaaccacagctctcgggccagaggggaggctggaggaggacctggggagcaacagactctgggcccggggttgctaaagtgctcaggagcagagctggggacaactgggggaggtgctgctgagtctctctctggctgaggacaatccctctcattcctccccacggtctgctcaggtgctgggacaccatcaactcctcactgtggtggatcataaagggccccatcctcacctccatcttggtaagataccctcccaccacctagagatggggaaacaggcccaaagggcaggcaacttagcccaaggtcacatgggaaattagtatctaggtcagaactgaaacgtagcttcctaatgcccaatgcaggatcatccccacccctgtcctaccagttcttccttgagcgtaagcggattgggagcacagtccttagggatttgaaggaggtagagttcccggatgacctgcccaaaggggaaatgccagaggagaggtaagatagagagaggggcagcaggaccctgggaaagaagacaggccagcagtcaaggggcctgaacacctcagccttcccgctctgactgcccgaactcgggtccccacccactaggtaaacttcatcctgtttatttgcatcatccgaatcctgcttcagaaactgcggcccccagatatcaggaagagtgacagcagtccatactcgtgagtgtgggcctagtgcctcagcccccagtacctccatccccagtcctcaaatcatcccacatctccttgaagtcctcccaccccaaacatccagagtcaccaaagagccacattgttctttcccacctccaccatggcctggctcagcccaccaccatcccctgctccagccccaccctcaccaggctgcactcagagccctgcatgcttctcctgcccacactcacctagcatccttcccaggtatgcatctgctgccaagccagggagctcaagaggacaccgatgacctgtgtcttgttcataccatgtgcccagtccctggcatgtgcctcacatggaaaaagggtgcaataaacacatagtagatgaatgccctgggggagaccccagtccaccaatgagacagccatgttcgggactcagtattcctcagtaataatgatgacacctgcagtttacatgccaggcacacgctaagggatttccatgcatcatgtcatttcatccacacagtcccctgcaaaattatctttactttacagggaggaaatgacatacactcccttctccttgagggttttggagcaggtcaccatgggcagggagaagggggcacaatgtccatggaccagggcttggaaaggtgtcaggactgttccccctgcttgggaggactggaggaagaggcaggtttttttgcgggagcaacaaggcttgaagacagagctaaagaaacatgaaaaatatgaaaagggaggctgtgggaaggcaagtagggtctgcatgctcacagatgggagtaggagattgagtatcagtgctattgacacaagacaaacctgggacgtcccacaaggccttccagtcctgggattcttcttggcctggcttctctttggagagtctgtgctgtggttctaagattcctggctagaatgtcacagactgctggatttaggattctattctggaatcccgtgattctccctgatgagactaagactcacattcctggtgtgactgcattctctcctgccaggtgtgtaggcggagcttcccttcctgtctgagaaggaaaggctgggggggcggggggggcatctgcagtctgctgaggggcagcacatcgggcctgtgcacccttatcctctcctttgccgatgggaccttatttcccccaacttacaatggttcaaaagggcctgaatctgaggcaaacagagctggccatggtcagggccaggtctgtgtggtgagacagaaaggaaacagttgtcagcaggcaaaaggggtgggggcagttggagatgaagctcctcaaggagaagctgtcagctcccactctacacctccccataagcctttgatttaaagaaagcctccatctgttagcctccggtgtgtgggatagttttgcagccgaagaggggtgggcattgctcaggatcttggcatggctgagaaccaggtccaggaaggagtgggaggggcaaggccagctcctctgcccccagcttgctgtgggacctcaggccttgggctagacttccttggactgactgctaaggcaggagagacagagtcagagaccctccctatccacaccccacctctcctagccagggagcaatgggttcacactgcctggatcagctatgaggtcaggtggctgggaggcctgaaccaggaagagctctgggccatgggaggcgggtgagcatttagaatgaatgctgaccctactgagcacacaaagctgtgaagaaggagctggtccttcagagcacgctgggagtatatgcactggtgtggggaggtaggaggagggggatgcaaccccagagaaggtggcaacttctggagaagcagacacagcagaaaaaacacagatagagggcgatactgattaattttgggttgtccctggtgatcaggtatgaacttgggtccccatcaccctcccaagtggccctgggcatatgtggtcagcacccagttagaaagacttgtttcctagtacgtcttctctcatggtctctcatggatgcactatacttcatagtacccaaaacacttccaagttcatagtgggcctctgtttctataatttgactatgtcgagcatacacttactgcattatacaaattggaaaaactgagaccaggagaggaggaaccagaatctcttgttgcctaagagattttctactgctcttgatggctgagagcatcctctactgcaatgatgaggtaagcctctcctagaccagggggcccaggcaacagaactcccaatagtggatttcagctaacatgtccctgttagcatcattctcactggcctctcctttacctcttaccctctctcctccagaagggtgagaatagagggggtttctttctctctcatgcttccctccaggccaggagggctgggggcagaagggcagaggcactgcagctgtggaacaggagcagacaagggcataatattcagaggaacctacagtccatcctcatacttcctggtcattgtccccatcttctgtgcctccagctgcccccatgccacaccctatcatatccacatgtgtggacacacatacccatggcctgtccctcccctgtctccagaaggctagccaggtccacactcctgctgatccccctgtttggagtacactacatcatgttcgccttctttccggacaattttaagcctgaagtgaagatggtctttgagctcgtcgtggggtctttccaggtatgggctgttgacttaaggctgcattcttccctggcttttaagggaattcaacctggagtcttggcccttgccactggattccaacctttttactgtaataagtattagataagcacctactttgtgcttagctctttccttaaccaggggaacacaggggctggagccaggggtggggcagggctgggggcttctggtctgtctacctcacctctcctgtcatcttccttctcagggttttgtggtggctatcctctactgcttcctcaatggtgaggtaagcccctcccagtccttggggcttaggcaatggaactcccaggaccagggtccggaaacattggtgggatatgtgcagagcaaggacgggttaaaccttgctgctccaagtatggtcctcaaactagtagcactggtgtcacctaggcccttgttaaaaatgcgcatctctgggaccaccccagacctgctggcttagaatctgcattttaataattattttaaaaaacaaacaaacagctttttactaaaccccagggggattcctgtgcacaacagagtttgagaaacacctagttaagtggctgtgtgcagtgagtggggaggggtgagggcttccaatgaaggttgagttgctgtggagctctggttacattgcacaaaaaacccactcaagtgagctggagacccaggatgggaagaattggagtacagtcacccctaggcagcatccctccctctccctggactgtattctaggatcctctctgcctcttacctcctgccattccaaggcctccttctgaacctggcctcaacccagtcccaagtttgcaccgcccgaggcagcataggggtccctccattttgatttcctaaagagaataagactggctagttcagaaccctaagtccagggcagcccaatcagcagtggaagaggctccacagcagtgggcctgaccaccttcccctctcctaggtgcaggcggagctgaggcggaagtggcggcgctggcacctgcagggcgtcctgggctggaaccccaaataccggcacccgtcgggaggcagcaacggcgccacgtgcagcacgcaggtttccatgctgacccgcgtcagcccaggtgcccgccgctcctccagcttccaagccgaagtctccctggtctgaccaccaggatcccaggggcccaaggcggcccctcccgccccttcccactcaccccggcagacgccggggacagaggcctgcccgggcgcggccagccccggccctgggctcggaggctgcccccggccccctggtctctggtccggacactcctagagaacgcagccctagagcctgcctggagcgtttctagcaagtga

SEQ ID NO: 22570 - DNA, 1354 bp, Homo Sapiens
ttatgttagattatgtgagattgcatttagaatatgattagaatttgcataaggaatggatttagagtttgagttagagaacagtacatcaggatagagtcaggtgttaggtattgggatgcttatggatctgacagtggcttatctttgcattccagcctctacctgcctggtgctggtcacagttcagcttcttcatgatggtggatcccaatggcaatgaatccagtgctacatacttcatcctaataggcctccctggtttagaagaggctcagttctggttggccttcccattgtgctccctctaccttattgctgtgctaggtaacttgacaatcatctacattgtgcggactgagcacagcctgcatgagcccatgtatatatttctttgcatgctttcaggcattgacatcctcatctccacctcatccatgcccaaaatgctggccatcttctggttcaattccactaccatccagtttgatgcttgtctgctacagatgtttgccatccactccttatctggcatggaatccacagtgctgctggccatggcttttgaccgctatgtggccatctgtcacccactgcgccatgccacagtacttacgttgcctcgtgtcaccaaaattggtgtggctgctgtggtgcggggggctgcactgatggcaccccttcctgtcttcatcaagcagctgcccttctgccgctccaatatcctttcccattcctactgcctacaccaagatgtcatgaagctggcctgtgatgatatccgggtcaatgtcgtctatggccttatcgtcatcatctccgccattggcctggactcacttctcatctccttctcatatctgcttattcttaagactgtgttgggcttgacacgtgaagcccaggccaaggcatttggcacttgcgtctctcatgtgtgtgctgtgttcatattctatgtacctttcattggattgtccatggtgcatcgctttagcaagcggcgtgactctccgctgcccgtcatcttggccaatatctatctgctggttcctcctgtgctcaacccaattgtctatggagtgaagacaaaggagattcgacagcgcatccttcgacttttccatgtggccacacacgcttcagagccctaggtgtcagtgatcaaacttcttttccattcagagtcctctgattcagattttaatgttaacattttggaagacagtattcagaaaaaaaatttccttaataaaaatacaactcagatccttcaaatatgaaactggttggggaatctccattttttcaatattattttcttctttgttttcttgctacatataattattaa

SEQ ID NO: 22571 - DNA, 33137 bp, Homo Sapiens
gacgtgctggacctcagcctctcagagctactcagccaccagcaggaggagaggggagcggcctggaggccctatccccacctcagtctccctgtcctcccccaggctggtggtccaggccgtggtgcctgccaggtgatgtggggcaaagccccccgcacaggccactgagagctccggacacgcacccggctgccaccatggcccgcctagccgcagtgctctggaatctgtgtgtcaccgccgtcctggtcacctcggccacccaaggtaggtgctgctggggccggggaggggccgcggctcccaaacccttctgggggggcagataaaatgttgaaaaccctcctgatcactcagtaaagaattacagccccctgccccgccccagacctcagctggagcaggccagtggaagactcaggggtaacacacaccccagtgccaccaagaggcccctggaccatcctcttacctccaacaagtcggctgggccaggttggtaggggccatcccgctgtggcccctgggaccaggacaggccttcttggtgagccgatgctcctctctctgtctctctctcgctctctctctctctctctctgtgattacatcttcgaggctctcactgggaagaaggcttaattaaagcatgcccgctgacgtttatttaaaaacaactaattacccggctcggccctatgccggccctaggatcctgcacacgccactattagtgccccaagcctgcccgcccaccctcaccgattactcaattactggccccgtgaccagcccaggccgggggcaagggcgggataaggtgagaggccaagagaagaggccagtaggcccggcccctcactctgggatgtgccccctgcccaccccgacatccctgtatgaagggcattggcgggtgactctgctccctctggccctgccctctggaaagctccaaaggttgaagggacacggttcagctgggccccagggccttggcactgccccgctggccagcaacctcactcctctgctgctacgttctctgcccatccaggtcctgccccatagccccagctgggccgggagggctgcctccacccccagacccatctgagccagccttccacccccggccctccctcccaagcccgggaaggctaaaattagatgaggaggcagatggtgctggaggaacacatgtgaaatgttccccccgctgggactcaactcaccccaaaaaaccccaagggcctccctgccatacccctggggtacccacccagatctctggaaaggctcagctctgtcaccgtcccgcacgagtgccctcccgaaacctcgtacagcaggtggtcacttccttcacctacaagcgacggtccccacattggggcatctgggtccctggctgaatccctgctgccctccagcaccccgcagggcctggctggaaccagcgtcacagaaggtgctgccccggccagcatggaccctgccaggcaccctctgttgtgcagacaaaccgccttaataatattcataataacaataattagcattcatatcatctcactgcgctctgcacacattaacaccctggagccatcacaacagtcctgtgagatgggaattgtcctctctgcccctcaggggagggacagaggcacagaggcggtcagtgacttggatgaggctgcagccagggagtggccgggctggaattccaaccccagccatctgtctggctcctacattctagttctccatccccgtgtggtacaaggtgatgaccaacatggggcaacgcaatccccccagggagctcagcctgctcagaacatgtcccttccttgtcacagtgaaatccttggaggttcaccagatgatactgatcaggcaccctccgtgtgcagggtgccatgctcagtgctttccttcaagagcattttctaaggcacaggatccctgcaggatgacccggggctgtaggtgctcattttacagattgggaaactgaggcttggggaaagaagaacggtggctgttcaaactttttaaatgtttttattttgagatggagttttgctcttgtcgcccaggctggagtgcagtggtgtgatctcggctcactgcaacctctgcctcccgggttcaagcgattctcctgcctcagcctcccgagtagctgggattacagccgcctgccaccatgcccggctaattttttgtatttttagtagagacagggtttcaccatgttggccaggctagtctcgaattcctgacctctggtgatccacccacctcggccttccaaagtgctgggattacaggcgtgaaccaccgcgcccagccactgttcgaacttgagcatgcatcaccatcacctggttggcacatagccctgcaggctcctggcctcacccctgggattttgatccagcaggccgagtatggggcccgaatctgcattctgaaccagacttcacatctgccctgtcagcggcaaagccagtctctatggtttcttctagaaacatgagttcattcccatgttttctctgctcctcgcatggggtggggtgaagttagggaagtccccaagccaagcctcacttctgacaccaatgacaagtttgggggtcccccagagaacactcaggtatgatcattcactagaaggacttggaactaactagatgttatgctcacagtttatttattttttatttatttattttttcgagatggagtctcgctctgtcgcccaggctggagtgcagtggtgtgatctcggctcactgcaagctctacctcccaggttcacaccattctcctgcctcagcctcctgagtagctgggactataggtgcctgccaccacgcccggctaatttgctcacagtttattacatcaaaaggatacagattaaaatcagggccaggtgcactggctcactcctgtaatcccaacactttgggaagccaaggtgggaggattgcttgagctcaagagtttgagaccagcctgggcaacatagcaagtacccccatcactacaaaaaataaaaaaaaattagccaggcatggtggtatgtgcctgtagtcccagctactcgggaggctgaggcaggaggatcccctgagcccaggagtttgaggctgcagtgagctatgatcacaccactgtgctctaaccttggtgacagggtgagaccctgtctgaaaaaacaaacaggccaggcgtggtggctcatgcctgtaatcccagcactttgggaggctcaggcgggcggatcacctgaggtcaggagtttgagaccagcctggccaacatggcaaaaccccgtctctactaaaaatacaaaaattagtggggtgtggtggcaggcgcctgtaatcccagctacttgggaggctgaggcaggagaatcgcttgaacctgggaggcagaggttgcagtgagctgagatcgcgccattccactccagcctgggtgacagagcgagactctgtctcaaaacaaatagaagtcaggcaagggaagaggtgcatagggcagagtccaagaaagttccatgcatggagtttccagttactcccttcagtggagtcctggacagtgttaactctcccggcaacaatgtgtgacaacacacatggtgtactgccaaccatagaggctcccccaagccttgttatccagggtttgtattggagctcagttctgtactctgtagccctgatagaccacctacagggctgagctgaatctctagcatctctagaagtcagctgagactatgtgacccaaagctcctgccccaagtcctgttagcatattcattaactagggccgccctaacaaagtaccagagaccatgtgtctttgtttgtcgcccaggctggagtacagtggcatgatctctgcatgccatcactgcaacctccgcctcctgggttcaagcaattgtcctgcctcgcctcccaagtagctgggattacaggtgcctgccaccacacccggctaatttttgtagttttttaagtagagatgggggtttcaccatgttggccaggctggtctcaaactcctgacctcaggtgattcgcccacctcgacctcccaaagtcctgggattacaggtgtgagccaccgagcccggcctagaccatgtgtcttaagcaacagacattgattgtctcacagttgcagaggccagaagtctgaggtcaaggtatcagccagggttggttccttctgaggcctctctccttggcatttatttgtttgtttgtttgatggagtctcgctctgtcgcccaggctgtagtgcagtggtgcaatctcagctcactgcaagccctgcctcctgggttcaggccattctccttcctcagcctcccaagtagctgggactacaggtgcccgccaccatgcccagctaattttttgtatttttggtagagatggggtttcaccgttttagccaggatggtctcaatcacctcacctcatgatctgcccaccctggcctctcaaagtgctgggattataggcgtgagccaccgtgcctgacctattttttttttattttttatttatttttgagatggaatgtcactctgtcacccaggctggagtgcagtggcacgatctgggctcactgcaatctctgcctccccagctcaagtgattctcctgcctcagcctctcaagtcgctgggattacaggcacatgccaccacgtccagctgatttttgtatttttagtagagatggggtttcaccacgttggccaggctggtctcaaactcctgacctcaggtgatccacccgcctcagcctcccaaagtgcggggattacaggtgtgagccaccgcgcctggcctctccttggcttatagatagatggccgcctgctcctgtgtcttcacattgtcttccccctgtacacttctgtgcccaaatttctccttttagccaggtgcgaggactcaggcccataatcctagcactttgagaggccaaggcaggaggattgcttgagaccagactagcttgggcaacatagaaaagggacccatttctatgaaacaatgtaaaaaattagccggacatggtggcgtgaatctgtagttccagctacttgggaggttgaggcaggatcacctgagcccaggaggttgagacttgcagtgagccatgatcgcaccactgcactccagcctgggtgacagaggaagatcctatcttaacaacaacgccccaccccctctttttttattgagatagggtctcgctctgttgcccaggctagagtgcaatggcacaatcatggcttactggagcctcaacctcctgggctgaggtgatcctcccacctcagcctccccagtagctgggactacaggtgtgtgccaccacgtctggctaatttgtgtatttttggtagagacagggtttcactatattgctcaggctggtctcaaactcctgggttcaggcgatttgcccacctctgtctcccaaaatgctggggttacaagtgtgtgcctctgtgcctggccaaaattgcccgtttttataaggaccacagtcatattggattggggcctaccctaatagcctcatttgaatttatctctataaagaccttatctccaaataatgtcacattttcaggtcctgggggttaggacttcagcatatgaattttcaggggaacacagttcaatccataacagcatatctggtgtagcccgaggaccccaggaaaacagtcactcttatcaagcagagcattccaaaggctcagacgtcacttcctaggagctgagagtccaggcactctctgggccaggttaatgtcctcactacacaagtgggcacactgagaggcccattctacagctgaatcaactgaggctgcctcagctggcttccaggacacagccgagccagaggtggtgttttcttggcagtgggtagggtcttcccttcctggcccaggcccaggagtgacaccatccccaaccctccctgcaggcctgagccgggccgggctcccgttcgggctgatgcgccgggagctggcgtgtgaaggctaccccatcgagctgcggtgccccggcagcgacgtcatcatggtggagaatgccaactacgggcgcacggacgacaagatttgcgatgctgaccctttccagatggagaatgtgcagtgctacctgccggacgccttcaagatcatgtcacagaggtgagtgggctctcgtggcagttcctggatgaagtgcccgcctaaaagcactgcacacctgccagcacacccgttcaccttacatcttttttttatgcattcaacacatgtttactgagcacttaataggtgctgggccccatgcagacgagaataagacccagtacatctccccacagccagcctgtgcccccgacagaggcctatacccatacatacactgggaagtccctccccccaccagcctcttgcttccataacttccatcccaagattagccagggcagtttgtttgtttgtttttgagatggagtcttactctgttaccaggctggagcgtggtggcatctcagctcactgcaacctccacctcctgggtttaggcgattcttctgcctcagcctcccaagtagctggggattataggcgcacgccaccacgcctgactaatttttttgtatttttagtagagacagggttttgtaattggccaggcaggtctcgaactcctgacctcaggtgatctgcccacctcgacctcccaaagtgctggcattacaggcatgagatgagccatcacacccagccttagccagggcagtttggagcttgtaaaatataaagaacagcaggacagagcgaaggtgtcatgggaggacttttcccttcatcccagactctttttttttttttgaagatagggtctcactgttgcctaggctggagcacagtggcacaatcacagctcactgcagctgtgacctctcaggttcaagcaatccccctgcctcagcctcctgagtagctgggactacaggcgcctgccaccatgcctggctaattttattttattttttgtagaggcagggtcttgctatgttgcccaggctggtcttaaactcctggcctcaagcaatcctcctgcctcggcctctcaaagcgctgggatgacaggcatgagccaccgcacccacccatcccagatttgagagctcatcaggctactccaaggaggagacacctgagcacagatgatagaagcacaggcctgtgtgagtgattgtgtgtggggtgaatgcttgagcatgcaagactgtaacttggagtgtgtctgtgtgattgcatgcatctatgagtatgacggtgtatttgttttattttatttagttatttaatttttgagacagagtctcagtctgtcacccaggctggagtgcagtggtgcgatcttggctcactgccacctccgcttcctgggttcaagcgattctcctgcctcagcctcccgagtagctaggactacaggcgcgcaccaccacgccaagctaatttttttgtatttttaatagagacggggtgtcaccatcttggccaggatggtctcgatctcttgacctcatgatccgcccacttggcctcccaaagtgctgggactacaggtgtaagccactgcgcccggcctgttttgtttatttttgagacagaatcttgctctgtcgcccaggctgcagtgcagtggtgtgatctcagctcattgcaacctccacctccagggttcaagcaattctcccgcctcagcctcccgagtagctgggattacaggcacgcaccatcatgcccagcttatttttgtatttttgtacagacagggttttaccatgttggccaggttggtcttgaactcctgacctcaggtgattcacctgcctgccttggcccccttaagtgctgggattacaggcgtgagccactgcgcctggcctgtgtgtgtatttgagtgtgagtatgtgtgcatttttgagtgtgtgactaaatgtgtgtgattgtgactaagtgtgtctgtgtgtctaagtgtatgtgaacaggtgtaggtgtgtgcagatgtgtgtgactaaacatgtctttgagtgtgtctgagtgtgtctgtatgagtgtgtattggagtgtgtatctgggtgggtggatgtgtgtgtgaatgtgggtgtttgtgggtgaatatgtggttatatgagtgtatttgggtgtgtttaagtgtacgtgagcgggtgtgggtgtgagcatgtgtgtgagcgggtgtggctgactgaggtgtgtgttttcatatctgtgagtggtgaggtggatgggtgcacgtgtgtgggggtgggtgggtgtggctgtgtctttgtgtatttaactgtgtctgtgggcagatgtgtgtatgtggatgagggtttgtgtgtggttgactgagagtgtatttgtatttctttgagttgtttgtgattgtgtgagcgtggaggggttgccccaggctgaggcaccacgtgtgcaaatctgcacaagcctctctcacacccacagtcagtccatgtagagctgatcagcctttccttcaaattacacccaggctggacgcggtggctcacgcctgtaatcacagaactttgggaggctgaggcagggggatcgctttaggtcaggagttcgagaccagactgggcaacatagcaagaccctgtctctactagaaactaaaaaataaattagccagtcatggtgtgtgcctgtggtcccagctactcagatgaccgatgcaggaggatcacttgggcccgggagtttgaggcttcaatgagctatgatcccaccactgcactccagcctgggtgactgagcaagaccctgtctctaaaaaaaaaaaaaaaaaaaaacagaccaggtgcagtgtttcacgcctgtaatcccagcactttgggaggccatggcgggtggatcacttgaggtcaggagttcgagaccaacctggccaacatggtgaaaccctgtctctaccaaaaatacaaaaattagcctgatacggtggtgtgagcctgtagtcccagatacttgggaggctgaggcaggagaatcgcttgaaccttggaggcagaggttgcagtgaaccaagataacaccactgcactccagcctaggtgacagagtgagactctgtctcaaaaaaaaaaaaaaaaaatgtgtgttaccaggggaggagcgggtcactgagagccccaggagagcaggagaggtttgggcaggggatgacagtgttcaggtggctgagatagctgggctgggctgggctggaggcacctcatcatctcctcctctctgcctctctctcaaactgccattcccctccagcaatcttgcctctcttccccgcttcctgtcccctgacacccctgccgagggtgccctgcataggcattcccagtccaggctctagcctttgcttaggctgtgggccccctccctgggagcccccttcctcccacctctccaaattctccctgctgacttcattcaacaccagctttgggggactgcattcttctccattatctctctagcacctagtacagcatctggcccagttcccatgtccgtggggaatgctgtgcagaatagttaccggggctgagggagtgtgatgaggcctctggagtcacatccagaaggacttgtagggggccttagtcctgcttcctctccgctgagtccccaacccccactgctccacaaccaagcctggagactctttttttttttttttttttttttttgagacggagtcttgctctcccccaggctggagtgcagtggcatgatctcggctcactgcaacctccgctttccggttcaaacagtcctcctgcttcagcctcgcaagtggctgggactacaagcatgcaccaccacgcccggctaatttttgtatttttagtaaagacgacgtttcaccatgttggccaggctggtctcaaacttctgacctcaattgatctgccagtcttggcctcccaaagtgctgggattatagccatgagccactgcgcccagcctagctgttcatttgttggtggatgtttgggctgcctccacgtttgtggtgattgtgaataatgcagctgtgaacgtgcgtgtacaacgatttgcttaaacacttgttttaaattcttttgggtacagtaatccccacttacccactggggaaacgctccaagaaccccagtggatgcctaaactgcagagagctactgaaccttgtatataccatgttttctcctatacagctctaattataataaagtttaatttacaaattaggcacagctagatgcggtggctcatgcctgtaatcccagcacttcgggaagtcgagactacaatgagccatgatcacaccgctgctctccgtcctgggcaatagagtaagaccctgtctaaaaaataataaaataaaataggctgggtgtgatggctcatgattgtaatcccagcactttgggaggtcgagacgggtagattgtttgaacccaggagtttgagaccagcctaggcaacacggcaaaaccccatctctactaaaaatacaaaaaattagcagggcatggtggcacatacctgtagtcccagctccttgggaggcagaggctggaggatcacttgagcctgggaggccgaggctgcagtgagccaagattgtaccactgcactccagcctcggtgacagagcgggaccctgtctcaaaacataataataataaaatacgttaggcacagtgagagactaacaacaacaataataatttttagtagtaaaatattgttacataaactaagggctacttgaacataagcactgtgaaaccgtgacagttgatggataactgagatgaccactagtgactaacagacagggagcaaatacagcatggacacgccccatacagcatgagatttcatcaggctactcacaacagcacacaacttaaaatgtatgaattgtctacttctggagtacagcggtgcgatctcggctcactgcaacctctgcctcctgggttctagcgattcttgggcctcagcctcccgagtagctgggattaccggtgcgccccaccacgcctggctaatttttgtttatttagtagagatggggttttaccatgttggccaggctgctctcaagctcctggcttcaagtgatccatccaccacggcctcccaaagttctgggattacaggtgtgagccactgcaccctgccccagtgttctattttttgttttcttttgttttgtttgagacggagtcttactctgtcacccaggctggagtgcagtggctcagtcttggctcactgcaacctccgcctcctgggttcaagtgattcttctgccttagcctcctgtgtagctgggattacagacatgcaccaccacgcctggctagtttttgtatttttagtagagacagggtttcactatgttggtcaggctggtttcaaacttctgacatcaggtgatccacccgccttggcctcccaaagtgctgggattacaggcgtgagccaccacgcccagccagtgttctatttttaaagaagaggatgaggtggatggatacagacagatcttcccacaccccatcctgccccccatttttctctctccctgctagatccttagtcccttctcaagtgtctgcctgtgtttagtacccttggttaagagcaggattgaaggggagacacagggcctcttctgccccatacctgtcgggaagcctctcaaactatgtcctgcatgcccgtgtcctgcctggcctagccccagcctgctgcaagggacagagaccctgacagtggggacagacagcagatgagacacacctttttgttaaataggttcccccttacatgctagccagccccctgggaagttgacagtgacttggaggagttgcctcttgggaaccgagaatggctttcccctggggatgctctctcctggctgccctggctataagtctgcacagcagcactgcccaaagggtgggatgtgtccacgagatggtgtgaagtggacacagctggacactgaacatttcattgatcgtaagtttgcagagacaccacctcacgtgcatggcttcacatgtattactctccagtgaacagcgcaggggctttaaagtccatttaaagaaaaatgccaaggatataatagtgtcagctacactcacaatgaaagagatgaggggtggccaggaaagcactgtttagcgggtgactcctccttcttagccctgaggatgatgctgtgctggggctgaaaatagaagaaccctggtgggaaagagagagcaggcaggaaacaaaaagtgcccacacaagtcctctgggcttggtgtgttagttcgttcttatactggtataaagaaatacctgagattgggtagtttataaagaaaagacatttaattggctcatagttctgcaggctgtacaggaagcatagtagcttctgcttctggggaggcctcaggaaacttacaatcacagcagaaggtgaaggggaagcaggcacgccgtacatggctggagtaggaggaaaagagaacaggggaggtgctacacacttttaaacaaccagatctcaacagcacggaggggatggtgataaaccattcattagaaactgcccccatgatccaatcacctcccaccaggccccacctccaacactggagatcacaattcaacatgagatttgggtatggacacagatccaaactatatcacttggtttccagctccactgccccttcccaatttgggggtgtctatgacaccatgaccctggagcatgcacccccacccccgccaccccgtctatgtgtttctttcccaatgccctgtttctcctctgaaggtgtaacaaccgcacccagtgcgtggtggtcgccggctcggatgcctttcctgacccctgtcctgggacctacaagtacctggaggtgcagtacgactgtgtcccctacagtgagtcatcttgttccttgtgcggatgcgggcccttctcgcatgagtgagtgaggaggagacaccttgacccatcacacatgtgcacacatgcatggggcctgggcacagtggggacagccgggcctgctctctccaacacacattctctaatcccagacaccagtgtccacactcagtgcctgctcccccgcctcacagactctgtcccctcctgtggggacaccttctccagctctccttaccccagcccactcaccctgcttcttcatgcaccctatactcatttccacactgccaggccatggtcccgtgctctgcctggcacacttacgtctctctcttctcccttggcctctatgcttttctcccccatctgcctccctcgccttctcacatcccttccttttctgactcttctgaccttttctgacccttctcatctaccttctcttccctctcacttaccccactgcccctctcaacaccgttctctcagcaccctcactccccacacacttcttcccaatcatggaagctggactctacacccatagagtgggataccatcctctgaggcctggtggcagattcagggtgaagggctggggggcattttcaacagattcatagctcctcactggtctccccattaccatgtggcacttcctgtctgcaaaggaaatgccgccatgttggactgagggtggcctccaggcagcctgaagaaagtgatttggggagccaggagcctggccatcttgcacctggccaaagggatcagacaaagacaaggtctctcctcctcagcaccccacccttgacatcacctttttcctgccctctctcctccctccctccttcccattatcccttcccttctcctcccacaatgggttccatgtagtcaacctggtggtagggcctccgggaagagtggggagaaggcagggccatcagggtgtctgagtgtggcgggccgggtttggggactaagaggccctgtaactctccctcctctcccctcccaccccaaccttccctgccagcctttgatttctcctcacaggtgactcgatgctggggaaacaggatcccttctgtgcttccgtaattttcttcttttactcttcgtcctttcctttcagcgcttgaggccttcagccaccaccgagggggatgcccatctgctccttgaagcctccccacagcactggggacacggctgactcccgcggctgggacagcggggaaggggggtgggaggcagcgagctcagcacaggggggcagtcagatgggtgtaggttcaaggctcgactgggctcttgagttttctggctctgaaaccttgagcaaatgatttaatttctctgggccactacggaaggaggtgtgagtccatgagatgacatgtgagaagcgcttggcccagggccggccacaaagtcgctcctggtggcagggttttgagtgccgagtgtaaacttcccaagggcagaggcttcgtcttcacccgccgccccagcgcccagacccatgcctggttcaggatgtgctcagtaatattaccaatgccctttaagccagctgagcctgtttattcatctgtgatggggtggagaggggtcaaaagccttccctgggaagccacaaggagtagcgacaacgcatgtcaagcttgtcaagcttgtgtgcacccgagctgtagatgcaaaggaaatggtgcctgctttcgccagccatgtggcctcacttcagtgtgcctcagttttcccatctgtagacagggttctcaaaagacggccagtgaggtgcgtagcatagttgctggcccctcgtgagtgctggacacttggtagtcgttgcttttgttgcagctccttgtaatgcctcttgtcaattacgattattgctgtggtaatcaaaattaaaataacaacggataatgacccaacttctcccgaggcaggtgagataaagggcaggaaaaattcctcggtccaggtggaagccaaagcaagtagacgagaggctcaggtcaagccgcaggaaagaagctaggggaggagaggagctgagaaacctcctggagccgaggccctgagcgtggtccaggggctacaaccgacagagaccaggcaggctccagggacagagggcaggacagttcagaggatgagtggctgcctgtctgatggaagagagatagcctgagcccttggggagacaggagacacacgcacacacacacacgcgcagacatgtgtgcacacatacggggtggatgttgggggcagagctaactcctgatgctccagaggaaggaggctggagttaaagcggggacaggaggtagctagaggacagggaggccaggcactcacttgtccccaaaatgttcactgagcatctcctgagtgccaggccctgggtgaggcgctgggaagggaggcagaggctgcccctgcggagctccctgctggaaccttcagagaggggccaggagagccagtccctccagtcagaagttcctgaggggccagggatgcagagggggagcggcctgggcagccacctggcccagggcttcagaggctgggggtgaccccagtgctggtgagggtgggtcaggggtgggtggcagggggcacgtgatgtgtgggaaccctcccacacagtggacaagcccgactaatgctggatttgctttgcagctgagcacagtctaaccgcgccccttcctcccctaggtgccgcccgtccgcagggcagcgggcagggcggagctcccagctcctgggcccccgggccctgggtgggttgagcagagaagccgagcctcagacttgcccctggggagcctgggagcgtgtctgtgcccccacttgctgtcccacccagtctgtgtcccccacccccgccacctctctgcctccgtctccccaaccctggctctctctggggcccgggtgcaactgcccgtctgcctgtcgttctgtgtctggctctgccaccttctctctgtgtttgcttcttctgggttgtgagggcttgggggaagtcagctggacctgggtgaggccagcataaaggggaaggagttcagcctgtttcttggctgagggtgggcccaggccctgggagacactgaaatccttcccctggggcccctggttctagcaggagggcagcaggcagggtgggaagggagccgagtggcttatccaccccaccactccctggtgccccctctgaccggagcccacctcccagctggggctccctactccctgcccccgccttgcaccaagggtgccccctcccacctgagggctctgtctgcctgcctgtacccccctaccacccctgtgtctttctgtgtcttctccctcctgtgtgtgtccccctcgtccctctgactgtctccccagcaccctctcaccccacctgaccacccccagaggaagggacctgggggcgggggcccgagctgatgctacggaaggggttggggaagcaggagcgaggaaggaaaggaaaagggggcgtgttgccagaaaagaaacgaaagcaatttaatctctttttttttctctttttttcttgcacattttttttttcaatttgttttctctctctcttccgatgcttaaagtagaagtggagcagaaaggtaaacgcactgttaccaatgctaacccctaactcacactttgttctacctgtaccatacttatgtgacctgccctcccccggccccttcttctctccccaacccacacttggtccggtcggtatcccccaccctgggttgtcctcccagtgggaccagccctggtgcggccacgggcatctccaccctccagatacccacggaagctcctctctgagcttgggcaggattttctctctctcgctgtttctgtctctctctgtccctccttcctggtccctggccctttcgggggacctggccttttctcatacttcttttgcctccttcaggagaagtgtataagcatccagggcgggtggggagggagggactcccttccccggctcccccactggggcaccgggtgagctgtctctctctctctctctctttctctctctctctctctctgtctctcccctctctcttcctccttcccctgtaccttttataacatgtttctggttcatgggaggcgggctggaggggacaccattgttttccttttggggagcagattctcctatgtctcgggctcctggtggcttaagttccttctggtttgatgtttccaaggcccagagctgttttggagcatggagcaccagtcctccccacccccaacctgatccccatctctgaccagctgggggcccagccctggggaggggtgtcagctgtccccagccctgggagggggcagcctgccaaaaaatgaaaaaatgagggcgagggggcgggggcgggcctcgtggttgggggagcgaagggtgggggagcgtgttctctgtttctttcacacttgcaaagctgcagtcagggtttcttctgggctgttgtggttagaggaccagggagatgggcggcgggcggcgggggcacagtctggggacttccacagactccgtaatttctagcagagaactccctagtggatggggctggccattactggctgttattggggggagcggaggtgctgctgctgaggggcttctagggtgagatgttagggatgaccatttcctctccagaaagttttgggaaatttacccatctgaggccggcagcagcagcaggcagggctggaggacatggcctttagggatcccttttgccttgaaattacagtggtctgtggagcatcccttccgaaggaggtggggcagggtccctctgagctgctcccctccccgtcttcccctctcccccatctcagagaggcctgggctgctggccccaggtccgccccctcaccacacccctccagtctcctctctttctcctggagtctctctccctcccagcaccagccactcttcttgcaggcccactggtttggatgcggcaccactggagattttctcttcgagggccagggcagggcgggtggggtgacggggcaagggagggaagaggagggattgggagtttggtgctggtgaagggtccttgctgtccaaggccccagacagacccttcctcatcttctcccccttcccctgggttgacctctaaccacatttttcccccctgacaccctctgagcaggttaggctctgaggcctcccaccgtccccttcacacaaacacgtcccctcagatgccacacacctggtgggggtggggaccggcttgggcagaggccagtgtgctggacagagtgggcaggccgacccctcagggcatcagggacagggggatggccagtccccagggcccaagccagggtcgttttggctcctgcccagctctatgtcccaggctcctctccctctacaaaaactacatcctggctgctttgtgccagggggcccctgagccacattgttcccatgctgtgaagggagtgctgcctgtccccctccctcccaagcctgctggaggtggggaatgaggactagcccaagcccctcttgccactggggctgccccccaagccggtgccaggtcccagccccccgatcccctcggggccagctgctttggtgacatgccaagcaagagcagagaattcactgcaaaccctccaccctcgccctgtgccctcgccctggcctatgtgtgggttctgccagccaggaggtgagggaggcccggccatcctggatggaggggcgcactctgggaggaggtggggtgtctggccacactgacccccggatcagtcaaggggaggttaggagtaggtggtgctgggacgtgactgggcaagggtgggccggccagcagtggccaacgagatgcagttgaggttttcctccttttcagggattgggggggtggggcggggccccccacctttctgacatcagcgctgccttggtccctcttcccgagccggggatggtcgcaggtaaatcggggtccgggccaggggaggtggggggcctggctggggcgggctgggtctttatcctagcgcctggttccctcccctgccccctccgagctggacctgggactgcccccctgagggaccctcagtcgggcctgggccttggagtgaattctctgctcacccctctctcctccgccagcactaaccctttcttcccaggtggtttgcagcgcagcctcccacggagccaggacctcgccaagccccatacgcccttgtctctcttccctctgcacagctctcctctccctccccaactctcccgggagccctgtccctctccatgtccccacccccacccctgtgcacagtgccactgtctgctgctgagccagaccccatgagagaccctgccggctgggggcagggctgggcgccctccaggaggggccagactctttcattccccgtcctagcctgggagctgcctctgggaatcccttcctcggctactgacttcgtgggtactgggtggggggtggggagcaggctgcatcaggaacctggggagagagttgaaacccctatcctggaatagggagacactcctgacacccacagtgggtatggaaacaccactctaccttgcaatttttgcaggaggaagaaagaggagttaaaaaaaaaaacactgtccgggtgtggttggtgaaggatgggatcctggaccctagctcttccctaagtggcagagaagagggagaaggggccgggtgctgagtccctggaccgtcaaagtcaggagtgactgtagcggggagattctgcccccacttaaatcacacaggaccacctctgggagggctcttgccaaactcctccccagcctgtggggtctctagcagccagggaagggaagaggggcaccacttcccctcactaaccccgctcttaatggccttcagggttcacatttccagggagaggggcagctgggcagggcgtggggagggggtcgggtcccagcccggaaacccccttcccatcaccagccataccaagcaaccgtgactgcagcagcaggaggggacaacctggctccccaccagcagcgtgaccaacttgcctctctcccccctctctctctctctctctctctctctctctctcctccctctcgcctctgccccttctctcctacctcctcccctcccgcccactctgcccagtcttcgtgtgcccagggaccctgcagaaggtgctggagcccacctcgacacacgagtcagagcaccagtctggcgcatggtgcaaggacccgctgcaggcgggtgaccgcatctacgtgatgccctggatcccctaccgcacggacacactgactgagtatgcctcgtgggaggactacgtggccgcccgccacaccaccacctaccgcctgcccaaccgcgtggatggcacaggctttgtggtctacgatggtgccgtcttctacaacaaggagcgcacgcgcaacatcgtcaagtatgacctacggacgcgcatcaagagcggggagacggtcatcaataccgccaactaccatgacacctcgccctaccgctggggcggaaagaccgacattgacctggcggtggacgagaacgggctgtgggtcatctacgccactgagggcaacaacgggcggctggtggtgagccagctgaacccctacacactgcgctttgagggcacgtgggagacgggttacgacaagcgctcggcatccaacgccttcatggtgtgtggggtcctgtacgtcctgcgttccgtgtacgtggatgatgacagcgaggcggctggcaaccgcgtggactatgccttcaacaccaatgccaaccgcgaggagcctgtcagcctcaccttccccaacccctaccagttcatctcctccgttgactacaaccctcgcgacaaccagctgtacgtctggaacaactatttcgtggtgcgctacagcctggagttcgggccgcccgaccccagtgctggtgaggacgactcacttccaggcatggagcctgcttgcctttgtcccctccacccccacccacccctgggtcccagagtggggagccccatcctgtgagctcttggggatcgggaggtaaaggaaattcacagcatgtgacagacgctgttctaagcacttcacagtcattaactcgtctcctcacggtctatgacacagggatccttactgccctgttttacagatgacactgaggctctgtgtgggtaggggattaagttatttgaggatttgaacccagcctcccaaccactgaactgcagtgcctctcccaggggcctgggcacctttactccaggaacccttggatccaccaaaatcctgggtggaagtccagtatccacaaaagagctgagctgctgatgctgaccgggctgagggcaactctgcagtcttcttttgccccgcctagctgccctgctagctctgtgccaccccagggctccagggagcccgatctaaccccatcttgtttgcaaaagggggagttgaggcccccagaaggaaggagcatagccaggttacataagccaaagtcagctagaacgaggatggggggcggtggtattcagcccccacctggtggcggggctgacctggattggggagggctcctgccctcgggctcaacctgggaggattcctgtcccccagacacctctgtccctgcctctcccctgaccgttctctcagaccttatggtacacatcgtggatttttaccactctttgctactttatatgggcccatgggcataagggactttggtgggcacagagcggccaggggagatcaactcatagacccagtggggcccggcacgtgtttccacttcagtagatgaggaagatgctaagatggcctgggaccccctgcccaagcacactgtggcatggccctgagcatggggatgaccctgtctcgtatcccctctccaggcccagccacttccccacccctcagcacgaccaccacagccaggcccacgcccctcaccagcacagcctcgcccgcagccaccaccccgctccgccgggcacccctcaccacgcacccagtgggtgccatcaaccagctgggacctgatctgcctccagccacagccccagtccccagcacccggcggcccccagccccgaatctacacgtgtcccctgagctcttctgcgagccccgagaggtacggcgggtccagtggccggccacccagcagggcatgctggtggagaggccctgccccaaggggactcgaggtgagtacagaggctgcagccaggggagggatgggggccatgcccccagcagcttagcacagatgcatgtgtgggtgggggtctctactgcggagcagaggttttctgagggcaggggtcatccccagtgaccagcagagctctcagggcacaggagccactcagtgcccctggccccacctgcagaacctgcagggagtccgcaggaggtgacctggctcccggcctcaggctgacctgccacagccccaggcacagtcagcttcacatggatggccagctgaagtgcaaaaagggcagggccgtgtgtcctggagatctgaggggagggttggcaggtgcttcgtggagagggggcgttcaagatgggccttgctggaaggttctaactctggaggcaaagacagaagggggcaggagggagagctcaggggaagtgagtggcgcctctttcgactgtccagcccgcttcatgtctgtttctccgtgtttccctcacctccctcttcgcccgctcgtcccccactctctgtcatctcctttccccctctctgtcccatccttctcttcttccctttggctcccttgtctgttcctgtctgtctgtccctgcaggaattgcctccttccagtgtctaccagccttggggctctggaacccccggggccctgacctcagcaactgcacctccccctgggtcaaccaggtggcccagaaggtaccagccaccacccctcgcaggcaggcacatgtgctcgggcccagggcccagggcccagcgggggtcgtggagcagctggggagacatgggctggcaggtctggaaggcaggactgtggggtcacctccctggcctacaaagggagcagggacagatggggtgggaaggggcagatggcgatggggaagtggagagagagataggagaggctgcacaggccagggaagccggggagggcaggatggtccctgacagtcctgggattcccccttcccgcccccacctcatgcagatcaagagtggggagaacgcggccaacatcgccagcgagctggcccgacacacccggggctccatctacgcgggggacgtctcctcctctgtgaagctgatggagcagctgctggacatcctggatgcccagctgcaggccctgcggcccatcgagcgcgagtcagccggcaagaactacaacaaggtggggcctggcggtggcgctgacctggtatggggagggcgcctgcccccaggggcttgggaagtacctgacctggtacctcccagccaggctgccacctccactcctttcctcagagaggaaggacccccccctctccgccaaggactgccgggtctcactcctgtgctgccccggatggtcctgggggttggggatccctgaggaatgtcttgctgatagcccagccctgggtcagtggtaaccgcagacgagagagctatccagatgtgacagtattagggtgagggaaccggcacccagaggcctggcctgacatcacctccatctctttctagatgcacaagcgagagagaacttgtaaggattatatcaaggtgagacccagggggtcccagtgtaaggaccgtgggctccagctgatggggggattaggggtggaggttgagaagagggcatgcagagcccacccccaggaattagagggtgttggggggctcacagcaccatgccctctgcctgtgcaggccgtggtggagacagtggacaatctgctccggccagaagctctggagtcctggaaggacatgaatgccacggagcaggtgcacacggccaccatgctcctcgacgtcctggaggagggcgccttcctgctggccgacaatgtcagggagcctgcccgcttcctggctgccaaggagaacgtgggtgagtgccacagtcacccagggcaaactcagatacgaaccttaaaccacggggttctggcctggaggccacaggggggctatccgacccttgggcatcttgccagagtctcgttctgcagcctgagcccctggactgggaacagaccccaactgtgtatgccttgccttcccctgtccccacagtcctggaggtcacagtcctgaacacagagggccaggtgcaggagctggtgttcccccaggaggagtacccgagaaagaactccatccagctgtctgccaaaaccatcaagcagaacagccgcaatggtcagtgtccccggcggggcctcgggtggggaagcagccccacccccaccccccagctctgtgccagcgtctctgtgccatttgtagagggcagcggtgctgaccttttctcatgctagtgtaaaatttgaggggattcatgggccctgaagtgctgcagagccctaagggtgagccttacagttgcaaagctggctcctgggcctcacagctcagagaggatggggccattgagatgaaggctcagagaggtcaggggcttgcccaaggtcacacagtgagaatgggtgggtcggaggcccagcttgtgtgtcctggcacactgccctgctgtttagaactgccttcagctgagcagtggtcttgtggacagggctccctgacccccacctgcctgggctatggactggcttcagaggtcccagtggccagcgtggccaagggctgaggagctggctgagctgggaagccaggggcctggatggaggtgcgccagctgaggatgctgacacatccaaacgtgcctgttctcaccaggggtggtcaaagttgtcttcatcctctacaacaacctgggcctcttcctgtccacggagaatgccacagtgaagctggccggcgaagcaggcccgggtggccctgggggcgcctctctagtggtgaactcacaggtcatcgcagcatccatcaacaaggagtccagccgcgtcttcctcatggaccctgtcatcttcaccgtggcccacctggaggtgagctgagccgtccccctccctccatgggggtccctgtaccctctgtgttcccaggctgtgtacctgcccctccatgtgctcacctccagaacaagttatgggttcttccactttagagcttgggccatttgtccccagagctctcagaatgtcaactggagccccagaccccaggcacttctttgatacttggtaccatccctgttgccaggtgtggggggtcggaatgggactccccggttctgactctagttatgacaccctggtgccaccacacaacaggacaagaaccacttcaatgctaactgctccttctggaactactcggagcgttccatgctgggctactggtcgacccaaggctgccgcctggtggagtccaacaagacccataccacgtgtgcctgcagccacctcaccaacttcgctgtgctcatggctcaccgtgagatcgtaagctggctggtgctctgctcctccaggcaggcccgattgctggcctggctttgcatggcatcctagagagatcacgggcagtaccaggggaggctagccccatgggtgtggggggcccctggtcttgcctggggcatgaggccatgcgtctggtcctctatggccatgatcccaccgtctcccaaggcactctggagaagcaagttggtgttacgttggtcatctctccacaagccttccagagcatgaggaagtgagcgcattgctgcgtgcagaggggtgagggctgccaggttggcggcaccagaggtcctcacggcccatggccttgcccagggccctgtctgtggctggcacctggctgagcccagcgtgcaaaaccaaaggccctgagcgtgccccctgttcctgtccccagtaccagggccgcatcaacgagctgctgctgtcggtcatcacctgggtgggcattgtgatctccctggtctgcttggccatctgcatctccaccttctgcttcctgcgggggctgcagaccgaccgcaacaccatccacaagaacctgtgcatcaacctcttcctggctgagctgctcttcctggtcgggatcgacaagactcagtatgaggtgggctgggactctagggcaggtgacggccagcgcctgggggccgggagaagaagggggacacctgtccaggcagcagcccctcaccctcagtgctccccgcagattgcctgccccatcttcgccggcctgctgcactatttcttcctggctgccttctcctggctgtgcctggagggcgtgcacctctacctgctactagtggaggtgtttgagagcgagtattcccgcaccaagtactactacctgggtggctactgcttcccggccctggtggtgggcatcgcggctgccattgactaccgcagctacggcaccgagaaggcgtgagtttccacctcccagccctgcaccctcccacctggttccctgctgggcggcaccccttggaccaggaccctcagggcggtagtcccttcctcctcctgatcccagaggctgcagcctgcagagtcctaggccttcatgagtcgctgggaatggctcctcggcttctctctataccccggccctgtttcctttacagctgctggctccgagtggacaattacttcatctggagtttcatcgggccagtctccttcgttatcgtggtgagttgggaggtgacacccctagcaccacatcttccttcatccaggctggccttgaccccagcccctgcccccgccccccaccccccccacacacacacacactctctctctctccacacatcggaactgagccaccggctgagaggatgaaagtgtgctgggtccatggagctccagtgctgagggctgctcgcctggggggctgtgatttgagcccctagtgtgtgtcaggccatgggccttgtcctcccagcagccaggagtggcattaaattgccggtcatgccaatcagctcaccgctgcacagcgggcacctcaggggcaggtacggggttctcccagcagaggcgagggccacagctgagatttcgccaggctgggccctagcctcagtgctcactgagggaggcagggccactctcagcccagcctgccccttgtcccgcccccaggtcaacctggtgttcctcatggtgaccctgcacaagatgatccgaagctcatctgtgctcaagcccgactccagccgcctggacaacattaagtgagcctcgcccctgcctgccccctgccccatcacccacccccgccccacgctgggcccacctcttccagggtgtcctaaaaggtagtgctgtcacctctggtgacacacattgcaattttaagtaccaacaggggtgttctattgtgttcactatgtacctacttaatgggtcttagatagcgtatcattagcacgtccaacctgtggttttaggggcatcggtatgtaggctgaggctaaattcaaaaggtgagtctgtttaagggcaacttaaagagaaataggcagcaaatatagcctaagtggtctggaaatttagcagaaacaatgaagttggcagaggaataactgatgttcacaataccccgacccctgacccagtacctttccctcaggcccaggctccggtggaggtgtcctgggcaggccactgcccccaaggcccactcggcccgctcagggctttgcagacagtgcccaggcccacccaagggcccccgttgtaggctgcaggggaggcctgggctgaggccgtcccctccggcgggtactttgactcccctgtcgccccactcccagatcctgggcgctgggggccatcgcgctgctgttcctgctgggcctcacctgggctttcggcctcctcttcatcaacaaggagtcggtggtcatggcctatctcttcaccaccttcaacgccttccagggggtcttcatcttcgtctttcactgcgccttacagaagaaggtgaggtcgaggcggggtcctgggtcacagcctcccttggagacgtttcctgggtacccaggagaaggcggcgagggtggaggggactcaggggctccctcaagcccccagtgagtgctgcagggcttctgtggtcaggtctgcgtccaccgggaggggagcacgagctcagggttagggagggtttaaccacgggtgaagagggttctggaaaacaagatacagcaacttagaggagtgagagcagaacagatttggtaatggggaaccctcaccaccatgagggccacgagtcaggcctgggagagggaggactttgggagccaccctgagggagcactgcctacattcatagttctggaaagaattgtgaattttgtggtgatagaaaggatctttttaaaataaatgtgttaaaatctgaatcttaaaaaaacatacagtccggacacggtggctcacgcctgtaatcccagcactttaggaggctgaggcgggcggatcacctgaggtcaggagttccagaccagcctggccaacatggtgaaaccccgtctctacttaaaaaatataaaaattagcctggtgtggtggtgggcgcctgtagtcccagctacttgggaggctgaggggctgaggcaggagaattgcttgaaccccaaaggcagaggttgcagtgagccaagattgcgccactgcactccagtctgggcaacagagcaaaactctgtctccaaaacaaacaaacaaaaaaaccacacatacaaagggctgggtgcagtggctcatgcctgtaatcccagcactttgggaggctgaggcaggaggattgcttaagcccagaaattcaagaccagcctgggcaacagagaccccgtctctatttaaaaaaaccaaaggggacaacagtagctggggaacatgggcagggaatggggatactggcagcaccctcaggactgaagctggggagacggagctgaggcatttgtagagtcagtcctggcagcagtgcaggccatggagactgctgttggacttggggagtggtgaggcaggtaaggcttaaggcaggggatggcagaggcagtgatcatgagaatcctggttgcaagggaggaggtggcctgtgtccctgctctgtccaacattgtcctggcccctccttggacacacggtcaaaggcagtgttttcacagcccccacctcacacgcagtggcagcaatgtcctttcaggggaccccaggcccctatggtctgatctgggcccctcggctcccctccctccaacctctgctctcagacacctagatgtggaccctcagggtgcagcccccgttcttaccttggcttaaatgaggcctcctctgatctatttatttttttaggttttttttttattatcattattatttttgagacagagtctcgttctgtccccaggctagagtgcaatggcgcgatctcggctcactgcaacctccacccccccagcttcaagcaattctcctgccaactagctgggattacagacgcccactgccacgaccagctaatttttgtatttttagtagaggtggggtttcaccatgttgcccaggctggtctcgaactcctgacctcaggtgatccacccacctctgccttccaaagtgctgggattacaggtgtgagccaccatgcctggcctcctctgatctatttaaaatcacaaccagtctggccaacatggtgaaaccccgtctctactaaaaatacaaaaaaaaaaaaaaaaattagccaggtgtggtggtgtgcgcctgtaatcccagctactcaggaggctgtggcaggagaatcgtgtgaaccagggaggtggaggttgcagtgagccaagattgcaccattgcactccagcccgagtgacagtgcaagattccatctcaaaaaaaaaaaaaaaaaaaaaatcacaacctgctcccaagtcagcactgcctaaccccctttctggccatagttttctccgcagcacctaacagcatccaacagcttgcatatttatattttcatctatgttctgtctctgtctactgaaatataagctctcagaggtagggatttgtgtctgttgtgttccataccttccctgaggcctaaattgtgcctggcacatagcggatgctcaataatgctctgttgattttatgaatgaatgaaaaactgtcagaggaggtggagaagaggatgggcctgagtaagaagagagtgaaacctgatcggctggctgttgggggacaggggacatcaaggcttccgtggcctgcaagtcgctgaacaggggaacacagtcattggaagctcggtctccggcctcccaaggctgcctgtcttgtgaccagccctgtgggagactggatcacagaggaggccagtgtcccagccagctgactgtcctccacctcccaggtgcacaaggagtacagcaagtgcctgcgtcactcctactgctgcatccgctccccacccgggggcactcacggatccctcaagacctcagccatgcgaagcaacacccgctactacacagggacccaggtatcgggccagacaggactccctggggctgagtgttggaacctggagcctgagaggtggggagtggcttggcctaggtttctgatcgtgatgatcaggtgagcagtctcagaaagacgccagagggtgggtggcccaaggatcccctcacatttgggttgtgttcccagagccgaattcggaggatgtggaatgacactgtgaggaaacagacggagtcctccttcatggcgggtgacatcaacagcacccccaccctgaaccgaggtgagaaggcatccttctgcctctggcttcagtctctggaggctcccggctgccttgtgacctctgatcctttggccaggtaccatggggaaccacctgctgaccaaccccgtgctgcagccccgtgggggcaccagtccctacaacaccctcatcgccgagtcagtgggcttcaatccctcctcgccccctgtcttcaactccccaggtgagagcacgggggaaacatcccaggttgggaaatggagggtttgtgtcccaagggacctctgcatgggatgttctgtgccccagaactggagcctggacttgcatttcgagctcatccttgccttttctcttctctcttctggctgccacctgcagggagctaccgggaacccagtaagtgtgactcttccctggggatgtttctgaggctgggagagggacagacagtggccttctcagacggcctcacttaaggaggagaactcgggatgcctccccatgcccacatttccccaccccccgacacacagcctctggcagccgaatggaggataatggatggtgttcattgagtttgggctgttaagtgctgagggtctgagcacaggaaagcgatcctgttgcccaggcctcctcacactgctgagattctgaacctccagctggggatgagatcctgggggaactggtccttgtcccccacctttcatcaatacgctgctgggctggtgtgtctagtgccagtgagggagaaagggaatgtgagatcagagatccagggggcagggggaagcctacggaaaaccagcaggaatcaagcccacttctccacatggaccgcaccccctcactgtcccctagtgcatccagggcccctcttcaacctgaccagcccctttctgccctgcagagcaccccttgggaggccgggaagcctgtggcatggacaccctgcccctgaacggcaacttcaataacagttactccttgcgaagtggggatttccctcccggggatgggggccctgagccgccccgaggccggaacctagccgatgcggcggcctttgagaagatgatcatctcagagctggtgcacaacaacctgcgggggagcagcagcgcggccaagggccctccaccgcctgagccccctgtgccacctgtgccagggggcgggggcgaggaagaggcgggcgggcccgggggtgctgaccgggccgagattgaacttctctataaggccctggaggagcctctgctgctgccccgggcccagtcggtgctgtaccagagcgatctggacgagtcggagagctgcacggccgaggacggcgccaccagccggcccctctcctcccctcctggccgggactccctctatgccagcggggccaacctgcgggactcaccctcctacccggacagcagccctgaggggcccagtgaggccctgcccccaccccctcccgcaccccccggcccccccgaaatctactacacctcgcgcccgccagccctggtggcccggaatcccctgcagggctactaccaggtgcggcgtcctagccacgagggctacctggcagccccaggccttgaggggccagggcccgatggggacgggcagatgcagctggtcaccagtctctgagggcacctcatggaccaggggctggtggcccaggccagggagggaaccctgggcagggctctggtgggagagggagacagatggaggcagtggctggtgggccactctctccaggtgcccctcagccatgggccctacagtcccctcaggggactctaacctgggggcctgaggtgccagggttcacagacagggtttcc

SEQ ID NO: 22572 - DNA, 31857 bp, Homo Sapiens
ccatctcaaaaaaaaataaataataaaaataaataaatcattttaaaatttttgagctgggagccgtggctcacacctgtaatcctagcactttgggaggccaaggccggcagatcacctgaggtcaggagttcgagaccagcctggccaatatggtgaaaccccatctcactaaaaatacaaaaaattagccaggcaccatggtgggtgcctgtagtcccagctatttgggaggttgaggcaggagaattgcttgaacccaggaggtagagattgcaattagccgagatcgcaccattgcacttcagcctgggcgacagagcaagaccctgtctcaaaaagaaagaaagaaaatttaaaatatggcggtactcacctgtggtcccagctactcgggagggtgaggcagggggatcgcttgagcctaggaattggaggctgcagtgagctataatcgcatcactgcaccccagcctgggtgacccagagagaccctgtgtcaaacaaaacaaaacaaaacccacccccatgaggacagggtgacagactctctggctttgagcatccgagtgggacgtgacatctgctcactctgtttgaacgatgggcaggatctgagcctgagaggggtcagcatcctcctcccacaaagtgcatcacccttacgcctcctttcccaccctgggatcccctctgaccccctttcctttctctgttgcagcattctgtgtctggctgactctgccgggagctgaaacccaggactccaggggtgagtctgctgggaagcagaaagcacagtccacagccagagcctggggagggtcctggacccccgcccagcccccttcagcccagggaaagagagggctcgtgcacgggaaactcagcgctctgccccatctcccccagtgccccctttttgtgtattcccttacccctcaccttctgaccgtgctccctgctcttgcaggctgtgcccggtggtgccctcaggactcctcgtgtgtcaatgccaccgcctgtcgctgcaatccagggttcagctctttttctgagatcatcaccacccccatggagacttgtgacggtacagaggcttgagggcagcgcaggggacatctgcgattatgaggcatagcccagtgccagtgggggacagaggttgttgtgaggggccacagccttaccttccagactatcatcatggccagagaaaagagaaagagggcaggtgtggtggctcccagcactttgggaggcagaggcgggtggatcatttgaggccaggaattcaagaccagcctgggcaacatggtgagaccctgtctctacaaaaaatacacaaaatagccgcgcatggtggcacacatctggagtcccagctactcagaagactgaggcgggaggattgtttgagcccaggagtttgaggttgcagtgagctatgattgcaccattgcactctagcctgggcaacagagtgagatcctgtctcaggaaaaagaaagaaacaaagaaagaggccaggtgtggtggctcatgcctgtaatcccagcactttgggagggattgtctgggcaacaggagcaagaccccatctcaaaaaaaaaaaaaaaagacagaaagagagaaggagagaaagaaaagagaagaaaagaaaaagagagagagggagggagggaaagaaaaaggaaaggagggagggagggagggaggaaagaaggaaggaaggaagggaggaaaaaggaaaaaatatgaagggggagaagtaagaagtgaataggcatggcttcctggagagagagaagctgcgtgctcaggaatctggagtctgtgcctcagtttaccgttaagactgggaagggggtacattctggccataggtttttttttctcccttatttttcttttttctttttttttttgttttttttttttttttttgagatggagtctcactctgtcgctcaggctgaggagtgcagtggcgcgatctcggctcaccgcaacctccacctcccaggttcaagcgattcttctgcctcagcctcccgagtagctgggattacaggcatgcaccaccatgcccggctagtttttgtatttttagtagagatggggttttgccctgttggcaggctggtctcgaactcctgacctcaagtgatctgccggcctcggcctcccaaagtgctgggattacaggtatgagccactgcacccggctgccatggggtttaaatttctacaaaaagactggggatggggatatggcgcttcctgtccatcccccacctcagcactgtccactgtgtccaaatctaggatgccagccagagaactgagatcaagtgtggtcttcaggaatggcctgctccagctgcagcatagcctgtgcagtgcaacttgagatcctttccaaaagatactaagcagcaggccccatgttggggagtcaggacgggggtctctgccctgacggaactcacatctttgggagatgacctcctgtcctgttgtgttccagacatcaacgagtgtgcaacactgtcgaaagtgtcatgcggaaaattctcggactgctggaacacagaggggagctacgactgcgtgtgcagcccaggatatgagcctgtttctggggcaaaaacattcaagaatgagagcgagaacacgtgtcaaggtaagaaccaccccacatcctccatcaccactgtccatgaggtttggggtcaccagagctgtttctgcagcatccagggagcaggtacccaagtataggttcagttcctggagtctgagatgagacaggtgtgcatgtacctgtttcgccagcccagagaggcagcgtggtgtgaaggccaagggaaaactctgggaccagctacctgggcccaaatcctggctttgccacctgttacctaaatgatattaccaacatcactactgctcttagagccttggtttacccatctataaaatgaggatgataataatggcctactcctatgccttctaggaggaccaaggaaagaataggtgcttctaacagagcccagcacacagcaggtgctacaggcatcttcattctttaaacgttattatgcactgtaatcccagcactttgggaggccgaggcggatggatcacggggtcaggagatcgagactatcctggccaacatggtgaaaccctgtctctactaaaagtacgaaaattagccgggtgcagtggtgggtgcctgtaatcccagctactcaggaggctgaggcaggagaatcacttgaaccagggagtcggaggtttcagtgagcggagatcgtgccactgcactccagcctggtgacagtgcaagactccatctaaaataaataaataaataaataaataaataaataaataagcaatggatgccttttaggagttgttcagacaagctgggctcctgtggggccacactcctggctggcactcagaagaaatctatttcgacacagcctgcctcatcccttgccatggtcttattccacactgcagctccagcccatgagaagccaggcccccatgcatcactctgctttgccttctttccagtgggaactagttgggtgcgggagggagcttcagacatctgcaaggccagatgggaaccagtagcaggtggacagagaagggagattaacacagagtacacagagtgggaagggaaggtgagcaaaggcaggaaatgaagaagctgaggctgagccaagggtcccaggggacattaagggggttcagcagacctgccctgctgtaaagagaaaagtggcagtgctcctgttcccagccctgtccctcctgttctccctgcagtcagtagagcctccctggtgggaggaaagtgaggacagagcagaggtgtacgttctgagagcacgcagctgcatagagcccagcaggggggctggttcacaggggtcccctgtgaacagatgctacattgcatgcacatatcttgaccaaaggacagagccttcctgtgaattagaaaaaggactctccgggccaggcacagtggctcacgcctgtaatcccagcactttgggaggctgaggcgggtggatcacctgaggtcaggagttcaagaccagcctgacaaacatagtgaaaccccatctctactaaaaaatacaaaagttagccaggcatagtggtgagcacctgtaatcccagctactcaggaggctgaggcaggagaatcacctgaacccagaggcagaggttgcagtgagccaggatctcaatattgcactccagcctgggtgacagagcaagactttgtctcaaaaaaaaaaaaaaaaaaaaaaaaaaaagaaaagaaagaaacaaaaagaaaaagagaaacagaaaagcctctcctctccaggtagacacagccccatttggggaatggagaggttttcagcctctgctcaccgccttggctgggcatccatatgtagtcagcaacctacacaactgtacgtggtggtcatgggtccttgtcagtgagagcctctgttttagtctatgttgtgttgctataaaggaatacatgaggctggatcatgtataaagaaaagaagctgatttggctcatggttctgcaggccatgtaagacacatggctccagcatctgcttctggtgagggccttagggagcttccactcttggcagacgggaaaggggaagctggcatcccatggcaagaggaaggaagcaagagagaagggaggagataccaggctttttccaacaagcagttttcatgggaactaacaaggcgagaactcactcatgacccaaggacagcaccgagatgttcatgagggatctgcactcaggacccaaacacctcccacgaggctccatctccaacactggggatcacatttcaacgtgagatttggaggggacaaatatccaaactgtatcaccgcatgcacaggtggtgtttgtaattattgaggaggtgtgttgccatgttagaaacaggccagcactggccgggcgcagtggctcatgcctgtaatcctagcactttgggaggccgaggtgggcggatcacaaggtcaggagatcgagaccatcctggctaacatggtgaaaccccgtctctactacaaatacaaaaaaattagctgggcgtggtggtgggtgcctgtagtcccagctaatcagagactgaggcaggagaatggcatgaacctgggaggcggagcttgcagtaagccgagatggcaccactgcactccagcctggacgacagagcgagactccgtctccaaaaaaaagaaaagaaaaggagagaagagaagagagaaaagaaaagaggccaacactgagagagggggcttagttggtggataggcagagacacagatgagcaggaatgaagtgggagagggctctcatggaccccatccgcacagaacagcctgctagttcggagcaggacctgcctcttgaagcctcagctcagggaagggctccgtggggccctgtctgcatccccctcacccctcagcattcttgttttttttgtctacctggtgtcacaggcctcataggcaggagacctggggccactccctcagctccttgccccacttactccaggcatcacagggccgtcccaaacacctggtcacctgtcgctatccaaacctcaaggttcagaaccctccacagagggtcacttccaaaagctcagaacatccccctgcccatctggcatcttatttgtttgttttgttttgttttattagtaaagatggggggggggtgtctcaccatgttgtccaggctggtctcgaactcctggcctcaagtgatccgcccgtctcagcctcccaaagtgctgggattgcaggcgtgagccaccatgtccgacctggtatcttatttgtacaaaacaaaaagggggctggcactcaggatattcgatgagctcactgcgtggtgcattccagcgcagtatccattctctctgctatcatcagcgactgccaggatgagacagtctccacacagctctgctcacctggaactctctctgatcccccagctcatcatggacccaggcaccctgtccagaaatgaaggaggagggagatttgaaggcagggccactgtccccagtcgaacctgccactggccaacaaccccacctggagaagatgcctcgtggagccctgacctctttttctgccactcagtctctgtccctttcactgagcgagactgccctgacccttcctgatagttttggtccacctgagtgcactggaggatgttgtggctaacggtgggcacagtgacatggactccccatacttggagagttgagtgaatggaagaggcactagtgtggacccaatggcaagagaggttaacatcagggccattgctccaagcctgatcctctcccaggaggtcaacccagatcccatgggagtggaaccattcagaaataggtctgtgtccctggtggaatgccaagagatgagatgacagatacacctccatctttgcccatcagcatctgtgcccctctccagccactaaaccttcacccagggccagtctttctcagctatggattctcactacatcctgccatttccaagacaccttcctgaggatcaaaaaaaggcaccttcacagccctggggcaacccagctgtatgtcggtccccactgtccaccctggcctgggacccactgtccaggcagccctggcctatgcagcaccagactcatgctcccctggggactggctcaggggccagtcttggtccatgtgcctggagctgggctctcagagctagtgtggatgggagagcaccatcctgctagggccaccgggattctgataactcagccagtgagcagctgtcctggggaaatcaaggccaccagaagcagatgctggagccatgcatcttacacagcctgcagaaccatgagccaaataaacttcttttcttgcaacacaaaacggactaaaccagagggttctcactgagaaggacccatgaccaccatgtacagttgcataggctgctgactgcatatggatgcccagccaagagggtgagcagaagctgaaaacctgcctactctccattcctcaaatatgactgtgactacttgaagaggagatgcctttttccaattcacaggaaggctctgtcctttggcccaggactgccactgggaaccaagacaggtcctacctgggcaagcagcatgccccctgcacttggtcccaagaaaatcccaccctgacctttgtcctgaatcctcaggctgggacatccctgccccagctgggagctgcccagggaggcaggggagatggggaggactcagatgcttccagccatatctgaacaacagaaggcctgggccaccatgctcaccatgggacacctctgtgtggattagaaaagggaggagatggccaggcatggtggctcatgcctgcaatcccagcactttgggaggccgaggtgggctgatcacgaggtcaggagatcaagaccatcctggctaacacggtgaaaccccgtctaatactaaaaatacaaaaaattagccgggcatggtggcgggcgcctgtagtcccagctattcgggaggctgaggcaggagaatggcgtgaacccgggaggcggaggttgcagtgagttgagatcaggcaattgcactccagcctgggtgacagagcaagactccgtctcaaaaaaaaaaaaaagaaagaaagaaaagaaaagggagcagacagtggtgccttccagatgcttccgtgccaggaaacatggcggaccctcagccccgaaagctgctcacagctacgggcattcttcaccctctccttcctcttgcagatgtggacgaatgtcagcagaacccaaggctctgtaaaagctacggcacctgcgtcaacaccctcggcagctacacgtgccagtgcctgcctggcttcaagctcaaacctgaggacccgaagctctgcacaggtagaggccccaggaagacgctgtgaggctggacgggagctggggatggagctgagtcaggtcctccaaagcagccgaggaggagggagaagatccgcaggttcccacaaggtcaaggacctgctaagcccctgcctaaggattcacctcccaggaaggactcgccacacggcagggaggcggcagggccttcagggcttggagtgcccttgtgggcccccagacctcaccccttcctcatctgtcacgtgcgagtggaagaaggtgtcacttccagttctaagaaggggaacctccaccatagtgagggagggagcaggagagagattttagtcagaaagtccagctcccatgactcagtttcccttttggtttcacctcctataaactggggaccatggtccctgctgtgcccatctggtaggaagaccatcataagatgctttgaaggtgaagttgaaggtcaccaagtggtggcacgtgcaataatggtcttcagtctgaggcaatgaaaagataggggagtgggtgcagtgagtggagggcaggcccaggctggtcagggacagggtttgaccctctggctttgtcctcagatgtgaatgaatgcacctccggacaaaacccatgccacagctccacccactgcctcaacaacgtgggcagctatcagtgccgctgccgcccgggctggcaaccgattccggggtcccccaatggcccaaacaataccgtctgtgaaggtcgagagctcagatcccacgttcccagagacccacaaacatctgatcacatgttcaacggcgcccacacaaaccaagcagaatgagcgctggaggcgcccgactgtgtcaggcgttcattcttctgaggctagatgagaaaagagcaagggtcctgcggaaggagctggggtactgaggggggaggctcagggggaccccaggcaacagctgatgactcactgggaggaaggcgtttcaccatattcataacctgctcatctgcacggggcccacctgctgtgcccaggcctctccacgcttccataacccagcgtccacctctccaaggggggcactaatgccgggaggaacgagctgggggcacagacaggagacaggaccctctccaggctgggacaggacctgacccccttcttcctgtcctcagatgtggacgagtgcagctccgggcagcatcagtgtgacagctccaccgtctgcttcaacaccgtgggttcatacagctgccgctgccgcccaggctggaagcccagacacggaatcccgaataaccaaaaggacactgtctgtgaaggtatgacctggccctagaagctccccacccccagcacacacactgacacgctcccgcctaatgagccgcttgtcttgttccctacagatatgactttctccacctggaccccgccccctggagtccacagccaggtgagtggcccccacagggacgaggcggcgggaactccatccacacagcactgcatccgtctccttgttctaaacttcccacccgccgtccaggctctctgacccccacatctcctctctctgcagacgctttcccgattcttcgacaaagtccaggacctgggcagagactacaagccaggcttggccaataacaccatccaggtaaggacaggacccagggcaagggggcgaggcaggaaggtggctgcatcccacagaggcctggggcagtttgggtctgggaggggacaggacccaatgcagtgggtgctggtctgactcccagcatctttcagggctggtggaagctaatggacacccaagtgcacttaatatctttcctcttgctttccctggactttgggtttaggtcagcattgatattgcacagaagtgttggcctctgaggggccataaccagagtcaaggatcacctagggaatcccatccaatgtcattttttttttagacggagtctcactctgtcgccagtccagagtttagtggcccgatctcagctcactgcagtctctgcctcccgggttcaagcgattctcctccctcagccccctgagtagctaggattacaggcacacgccaccacgcccggctaatttttgtatttttagtagagacggggtttcaccatgttggccaggatggtctcgatctcctgaccttgtgacccaccctcatcggcctcccaaagtgctggaattagaggcgtgagccaccgcgcccagccgccaatgccatcttcatcccccagatagacagtctctaggatctgttccctggggctgagcggttggagtcttcatgcgggccctctggcccatggctcactaggtctgtgtccacatccctccagagcatcttacaggcgctggatgagctgctggaggcccctggggacctggagaccctgccccgcttacagcagcactgtgtggccagtcacctgctggatggcctagaggatgtcctcagaggcctgagcaagaacctttccaatgggctgttgaacttcagttatcctgcaggcacaggtaggtccctgggtctgccccagactccagctctgcatgttttctgtctccttcctttcccagtcccaccagagccaagtgaccacacctgtatatcagtgttactctcatcgacaaactaaaataagagattaaaaagaaatacataccagtctggacaagatggcaatactcaatctctacaaaaaaaaaaaaatcttttaaattagacagatgtgatggcacaactgtggccccagctagttgggaggctgaggtgagaggatcgcttgagcccaggaggttgagtctgcagtgaactatgattgcatcactgtactccagcctggttcacagggcaagaccccatctcaaaaaagagaagacgaagaggaggaggaggaagaagaagaagaagagaaggaggaggaggtgaagaggaggaggaggataaagaggaagaaaaaggaggaagagggcaggagggggaggacagaaggaggaggacaggaggagaggaggggaggaggaagaggaggaaagaggatgggaggaggaggacaagaggaagaggacgggaggaggaggacaggatggggaggagaggaggaggagagaaggaggaggagaggaggaagaggaggaatggagaaagagaggaggaggagaaaaggaggaggagaggaggaggaggagaggagaaggaggaggaatggaggaggagaggaggcagaggaagataggaggaggagaaggagaagaggaggagaagagaaggaggagaggaggaggagacgagaaagagcggaggagaggaggagaggaggaggagcacaggaggaggaggagaggagtagaggaagaaggaagaatagaaagaaggaaaggaaaggaaaaagaaatgcataaataacatgcattttcattgtaatatgaattatcagcagtaaataattatgatgaagaatttaaaataacaaaatagaaatcacttcaaaagagaacaatttatttaatttggaatactataaattaatatcatttgatctctaagtatgatttctttcttgtttgtttttgtttgttttgttttgttttgttttgtttttttgagacagagtctcactctgtcgcccaggctggagagcagtgacgtgatctcggctcactgcaagctccgcctcctgggttgacagcattctcctgtctcagcctcccgagtagctgggactacaggtgcccgccaccacgcccagctaattttttgtatttttagtagagacggggttgcaccgtgttagccaggatggtctctcgatctcctgaccttgtgcataatccacttgcctcggcttcccaaagtgctgggattacaggcgtgagccaccacgcccggcctgcataataatttttaaagcatgaaaatgcatatagcattaattttattaagataaaattcacataacatcaagttcaccactttaaagtgtctgtttcacgtggggcgtgcctgtaatgccaggcgctcacacctgtaatcctagcactttgggaggctgaaatgggtggatcacttgaggtcaggagttcaaatccagcctggccaacatagtgaaaccccatctctactgaaaatacaaaaattagacaggcgtggtggtgcacacctgtaatcctagctactcaagaggctgaggcaggagaatcacttgagcttgggaggcagaggttgcagtgagccaagtttgcaccactgcactccagactacgtgagacagagtgccactccatctcaaacaaaaaaattaaaattaaaaataaaaataagaaaaaattttaaaagcgtgtgtttcggtagaatctagtatattcagaaagttatacaaccgtcacctctatttctaaaatgcttgcatcagcccaaaagtgaacactgcacatggtaagcaaccactcctcattcctcccttcctccaacccatggcagccgctaatctgctttctgtttccatggattttcctaatcaggatatctcacataaatggaatcatacaatatgtgaccatctagtctagctcctttcacctagcataatggttttgaggttcatgcatgccatagcatttatcaatatttcattctttttcatggctgaatactattctattgtatgaatacatcactttttttttttttatccatccatccattgatggacatttgggttgtttccaccttttggctgttgacaaaaagagtcaaactctgtaaaatatttgaagagatttattgtgagctaaatatgaatgtatgactgaccatggcccgtgacacagccctcaggagcccctgagaacatattcccaagtgaagtggtgttgttttctggggtaatacctgaggttcattgcctcatgccaagaaaattaaggacacagacacacaccaggagtgagtttatgagtggaggtttaataggcaaaagaaagagaaaggagaacaactctctctcttgtgagagaaaggaatgcccaaatgggacttcccacccatgccagagggcaccggattttatagacaggcttgaggaggcagtgtctaatttacatagggcccaaagattggttggaacaggtgtgacgtttacataaggtgcagggaagctggctgccccaccctaatcttattatgcaaatggagtcttcgccagctccttactgtatacgtggttggcaaagagatgggaagatggagccgccattttcaacatgcctagtcccaggtggccttttcctattggcacagctgccagcattcacctgtgcaggcttccagcttgcttgcctatgtctgcagctcgattttacaggctgctctttgttagaaaaaaaaaaaatgatataggggctgattttcattaaaaggaaagacttacccaggacttccttacccacactctctgcctaaataattcctttttaacttctatatcacaaggtagtcgtggtacagcttgttgtgattgttgttgttgttgtcttctgttggagacagagtcttgctctgtcaaccaggctggagtgcagtggtgcgatcctggctcactgtagactccacctcccgggttcaagcgattctcctgcctcagcctcccaagtagctgggactacaggcgcccgccaccacgcccggctaattattttgtgtgttttcagtaaagacagggtttcgccatgttaaccaggatggtcttgatgtcctgacctcgtgatccgcctgcctcggcctcccaaagtgctgggattacaggcgtgagacaccacgcctgcccccgcaacttggttttatacattttagggggacatgagacatcaatcaaatatgtttaagctatacattggttcagtccagaaatgcaggacaatttgaagtggaggtgtggggcgggtgcttccagattataggtagatttaagcttttctgattggcagttggttgaaggagttattatccatagaaaagaatgtctggaatacgataaggggctgtaaaggctgaagttgtatcatccagatgaactcttcaggtatcaggcttcagagagaatagatggtaaatgttccttattaagcttcaggtctgtgttatgttaaatgctggtcagcttttcctcaactccaaaagggaggagggcatgacacatgtcagaccccccacttcccaccatagcctgaactagtctttccagttaaatttagagtgccctggccaaaaaggaagtccattcagatggttttgaggggggcgggagaggacttcgaattttttttttttgtttagatggctggtgtgaatagtgctcttatgaatattagtggacacattttgggttgaataactgtcttcagttctttggggtatatactaaggagtggaattgctgggtgatatggtaattctatgttcagcttttggaggaaccaccaaactttttccaaagcagctgcatcattctaattccccaccagaaacatacacgggttatcctctccacaccttcagcaaaacttgttacttccgttttcttttgttctgtttttaattgcttttattgatacataaatcttacatatttatgggtacatgtgatactttgttgcttgcctagaatgtgtaacgatcaagtcagggtatctcaggtatccaccactttgagtacttatcatttgtatgtgttgggaacaattgaagtcctcttttgtaactactttgaaatacatcatacagtcttgttaattatagtcactctgctctgctgtcaaacaatagaacttgggccgggcacggtggctcacgcctgtaatcccagcactttgggaggccgaggtgggaggatcacgaggtcaggagatcgacaccatcctggctaacagggtgaaaccccatctctactaaaaatacaaaaaattagccaggcgtggtggcgggtgcctgtagtcccagctactcgggagactgaggcaggagaatggcgtgaacctgggaggcgaagcttgcagtgagccaagatggtgccactgcactccagcctgggtgacagagtgagactccgtctcaaaaaaaaaaaaaaaaaaaaatctgcttaataagcggagaggtggctggcttggtggctcacacccgtaatcctagcactttgggaggtcaaggcaggcagatcacctgacatcaggagtttgagcccagcctggccaatatggtgaaaccctggctattaaaaatacaaaaattagctgggcttagtgacacgtgcctgtaatcccagctacctgggaagctgaggcaggagattcgctggaacccaggaggcagaggctgcagtgagctgagatcgtgccactgcactccagcctgggtgacagagtgagactccgtctaaaaaaaaaaaatatatatatatatatgtataacttatactttttgtctaactgtatgtctctacctgttaactcacctctcttcatcccagtgatacaggagtgaaaaagaaattatttaggcagttagcaagggtcagagagtcctcagtaaggtttcccttttaataaaaaccagcccccaaatcatttcttttctaataacgagcagcctgaaaattcgagctgcagacatagaaaagcaagctggaagcttgcacgggtgaatgccggcagctgtgccaataggaaaaggttacctgggggcccggcatgttcaacgtgggggctccctcttcctttatctttgtcaaccacgtgtacagtacagaagcaggcaacgtggagccagccaggtagagaatccatttgcataataaaagattaggctggggcagccagtttcttcatgctgtatgtaaatggctcacctgttcagaccaatctttaagccttatgtaaatcggacaccgcctacccaagctcatctataaaacttcgtgcatttcaccacgcaaccggaagacccacttgggagcccctgtctctctgcaggagagggagttattctctttttccttttttttttttttttttttgagacggagtcgtgctgtgtcccgcagactgcagtgcaggggcgcgatctcggctcactgcaagctccgcctcccggggtcacgccattctcctgcctcagcctccggagtagctgggactacaggcgcccaccaccatgcccagctaatttttttgtatttttagtagagacggggtttcaccgtgttatccaggttggtctcgatctcctgacctcgtgatcctcccgcctcagcctcccaaagtgctgggattacaggcgtgagccactgcgcccagccagagctattctttttttctttcgcctattaaatctccactcttaaactaacttcttatgtgtccacatcctcaatttccctggtgtgaaacagtgaaacttgggtatttacaccacttcactagtgagatgatacctcattgtggttttgatttgcccttccctgataactaatgatgtttaacatcttttcatgtgtttgctcaccatttgcatgtcatttttggagaaatgtctattcaaatcctttgcctatttttaattgtgctgtttgtcttttggttgtccagttgtaagcattctttaaacattctgatagtagatcatctgagatgaatgatttgcaaaatattttctcccgttctgtagattgtcttttcattttcttgtcttttcactttaatgaatagaagttttaaatcttgaagacatttattttatctaatttttcttttgttgcatgtgcaattggtgtcatatttaagaattcattgacagggggtggtggctcacgcctgtaatcccagcactttggaaggccaatgtgggcggatcacctgaggtcaggagtttgagaccagcctggccaacaaggcgaaaccctgtccttactaaaaataaaaataaaaataattaaccagatgtgttggcacatgactgtaatcctagctactcaggaggctgaggcaggagaattgcttgaacctgggacacggaggttgcagtgagctgagattgtgccactacactccagcctggatgacagagcaagactctgtcccaaaaataaaaataaaaaaagaattcattaccgcatccaagaccaggaagatttacccctgtttcctcctaagtgttctagttttagcttctaagcttaggtcactggcttattttgagttaatttttgtttgttgtgtgagggtagggttaaaacttccttattttcatgttactatccagtaatcccagcactatttgttgaagagattattctttcccccattgtatagtcttggcaccccttgttgagaatcaactgaccataagatggatgggtttattcctggactctcaattctattctgttgtgtccttatgccagtattactgtcagtttgtagtaagttttggaatcaggaagtgtgaattctccaaccttcttgttcttcttcaagattgtttttgggtatttggattccttacaacaccatatgaattttaagatgaacttttcttattctgcaaagtaataataggctaaaatattgatagggattgcattgagtctctagaccactttgggggagtattgttatcttaacaatagaaagtcttccaatccatgaacataggctgtctttccatttagagagggccttttatttctttcaaacacttttgtaggccagaagcagtggctcacgcccaatattgtcagaggccaccaaggtgggagaattgcttgagcccaggagttcaagcccagccttggaaatatactgaaacatgatctccacaaaaaatttaaaaattagctggctgtggtagtgagcacctgtagtgccagctacttgggaggctgaggtggaaggattggttgagcccaggagactgcagtgagctatgatcatgccactgcactctagcctgaccaacaggtgagaatttgtctcaaaaaaaaaaaaatactcaaaaaactttcctataagtcttgagtctccttcgtaaaatgtattcctaacatttttgctgaaaatttttgcatctatgtccataagaaatattggtctataattttattttcttgtgatgtcttcatctggttttgttatcagagcaatattagcctcataaaattacttaaatagtgtttcctcctcttccatatttttaaaaaggtaaaagattcatgttcattctttcttaagctattggtagaactcaccagtgaagtcatctggtctgggctgttagttttgagaggttttgattactgatttaatctgttataggtctgttcagatcttctatttcttcttgagttggtttcagtggtttgtgtgtcactaggaatgtgtccatttcatctaggttacctactttgtagatatacagttgctcacactattctcttccgatattttgtaacttcagactatatatgtatatagtatatatattaagtcatagtatatcaaccactgcaggcacgattcctaacctaactccccttatgtaattcccacaactcatagaattgtccctggaggtgcagaagcaagtagacaggagtgtcaccttgagacagaatcaggcagtgatgcagctcgactggaatcaggcacagaaatctggtgacccaggtaatggctgagatggggaggtggtcagtgaagcttcatggtgggaaaagatgcccaagaatgtgaaaaataagagatttaaagattaaagggaagtgtgggatgtttggagtggggctgtaagaggagagtccagctgaggaggaacggaccttgttggggaccctgagatattaaccgtggccttgtcctgcaggatgtgatacacatagaactaaagattgaaggaaagtgtgggaggggtgaagccaaaggaaggtagcccatctgagtagaaagttctgtgcagggcagaggaactctggtgtggacccagagattcaacctactccaagattcaaccttggcctcgccctgcaggcccttctgtggtgggccttgtctccattccagggatgggcaagttgctggctgaggcccctctggtcctggaacctgagaagcagatgcttctgcatgagacacaccagggcttgctgcaggacggctcccccatcctgctctcagatgtgatctctgcctttctgagcaacaacgacacccaaaacctcagctccccagttaccttcaccttctcccaccgtgtgagtgctggtggagttggttggtgggtgaatagtctgagtccgggcatagccttgctgctcagctcagccctggggctcaggggtctctgttatgggtacattatctccccaggaaagtcagtccttcccaagccggctttgggtaagcatttctgagcatccgacccaccagctcacacctgtgttcttttttttattgagacagagtctcgctgtgtcagccaggctggagtgcagtggcacgatctcagctcactgcagtctccgcctcccaggttcgagcgattctcctgcctcagcctccctaatagctgggactacaggtgtgtgctaccacgcccagctaatttttgtttttttgttttttttttttttttagtagagatggggtttcaccatgttggccaggctggtctcaaactcctgacctcaagtgatccacctgcttcagcctcccaaagtgctgggattacaggcgtgagccaccatgcccagcccacacctgtgttctgttcctgcagtcagtgatcccgagacagaaggtgctctgtgtcttctgggagcatggccagaatggatgtggtcactgggccaccacaggctgcagcacaataggcaccagagacaccagcaccatctgccgttgcacccacctgagcagctttgccgtcctcatggcccactacgatgtgcaggtgagacccttaggaggggatgcactctgcatttattgccgtgtaacaaatccccagagacatagcagccttttaaaaaaatatatgcattatctcacagctctgggtcagcaagctggcatagcaagatggcttttctgctcagggtcttacaagactgaaatcatcatgtcaccccacccccagggctgccatttcatctgagacttgaggtccttctccaagctccctggttgctggcagaattcagtttcttgtgattgtaggactgaagtctcactttcttagctgtcaggaaggcatcacattcagttcctagaggccactcatatcccttctcacatgaccctctggcaaacttctagcattcctatctggaggacaaggaaaaaaatttcctcacgcagaatccctcttaagctttgtattagtcgaggttctctagagggacagaactaatggaatagatagatagatagatagatagatagatagatagatagatagatagatagatagatagataatttctgcctgcttatattctagccacactggcagctgattagatggtgcccacccagattaagagtggatctgcctttcccaacccactgactcaaatatatacatatatagagatatatagagagagatctatatatatagatatatataaaggggagtttattaggtattaactcacatgatcacaaggtcccacgataggccgtctgcaggctgaggagcaaggagagccagtccgagtcccagaactgaagaacttggagtctgatgttcaagggcaggaagcatccagcacgggagaaagatgtaggctgggaggctaggccagtctctcttttcacatttttctgcctgcttatattctagccacgctggcagctgattagacagtgcccacccagattaagagtggatctgcctttcccagtccactgactcaaatgttaatttcctttggcaacaccctgatagacacacccaggatcaatactttgtatccttcaatccaatcaagttgacacccagtattaaccgtcacaagttttgaatctgattctccaggaagagcccagagcttataaagactcatctgattaggtctggcccacccagggtaaactctgccttttttttttttttagacagggtctctgtcacccaggctggagtgcagtggcacagtcatagctcactgcagccttgaccttctgggttcaagggatcctcctgcctcagcctcctgagtagctgggactacaggcatgcaccaccatgcccggctaatttttgtatttttactagagatggggtttcaccaagttggccaggctggtctcgaactccttacctcaagtaatccacccgcctcggcctcccaaagtgctggtattacaggcaggaaccaccacacctcgcccacctgactttcttatctcatcacttagagtagatccaagggacatcatcatcatatcctgcgggagaaagggccaaaccacccttttgttttccatgacaggaacatcttatcaatatcctcccaggcagcaagccataccgcccagcccctcccgcccagacctgtaattaccccagcctgtaagcggcagtgggttctggcacgaagctagctcccccctccacaagtctcgtgctggacataaacctgcattgctgtagagctgccaactctctgtctttctttaactctcactttcccttcaaaacctaacgggcccacacctggaatctctgtgctttgggaggctgaaacgggaggatcacttgagcccaggaattcgagaccagcctgtgcaacacagaaagaccctgtctctacaaaaataaaaaaaaaaattaggacgggtgtggtggctcacgactgtaatcccagcactttgggaggccgaggcgggtggatcatgaggtcaggagttcaagaccagcctggccaacatggtgtgaccctgtctctactaaaagtataaaaattagcctggcatggaggcacatgcctgtaatcccaactacttgggaggctgagacacgagaatcgcttgaaccgaggagacagaggctgcagtgagcagagatcgcaccactgcactccagcctgggcgacagagcaagactgtcaaaaaaaaaaaattagcagggcatggtgccatacatgactataatgcacacccgttgtcacctacatgactacgcctgtattcctagccacccatgaggctcgggtgacaccttcgcaaattaaattaaattggtgacatcttcacaaatttacctggctccctcattcttgaatgtgctatgccaaagtaaaaattttaaatggtggtggggtcattaccccagagcaggaaagcatcactgtgaactcttcttttccgggtcccaggaggaggatcccgtgctgactgtcatcacctacatggggctgagcgtctctctgctgtgcctcctcctggcggccctcacttttctcctgtgtaaagccatccagaacaccagcacctcactgcatctgcagctctcgctctgcctcttcctggcccacctcctcttcctcgtggcaattgatcaaaccggacacaaggtattgacagcggtgttccagagggctcccttccttgacgcaggacacgctggctcatggaatgatgcggcatttgattccttaatataatagcccggctgggcgtggtggctcatgcctgtaatcccagcactttgggagactgaggtgggcggatctcgggagtttgagaccagcctgaccaacatggagaaaccccgtctctactaaaaatacaaaattagccaggcatggtggcgcatacctgtaatcccagttactcaggaggctgaggcaagagaatctcttgaacccaggaggtggaggttgtggtaagccgagatcgcaccattgcatgccagcctgggcaacaagagtgaaattccgtctcaaaaaaaaaaaaaaaaaaatatatatatatatatatatgtgtgtgtgtgtgtgtgtgtatacgtatatatacacgtatatatatataggcccttgagtcctggggaatattagaagagaacaccaccaatttcccattgcctgactcaactacacagcaaatattctctataatgccatcaaatatctcagaattctccccaacaacatggtacaggagaagccatgggccacactcaaatctgatcgccgctctgggcgtcttttacttctccgccaggtgctgtgctccatcatcgccggtaccttgcactatctctacctggccaccttgacctggatgctgctggaggccctgtacctcttcctcactgcacggaacctgacggtggtcaactactcaagcatcaacagattcatgaagaagctcatgttccctgtgggctacggagtcccagctgtgacagtggccatttctgcagcctccaggcctcacctttatggaacaccttcccggttagtgcaaattctcacaatccttatcttctccggcataaccatggccattgctagaacctagatagcatttttatgacacctgcttttaattagatcagtagggattttaggctctattggttggattacactgcagctccttattcttagctattgagtttatttcaattacatttcaagctaggcattgtagaagagggttttcggaaattttctgaatgaaataaagggcaagcctttggaaagcacgaataggacaaagacactatgtcataatccctagggcatctttctgctagaagattataataattaaggagggtcaggctcagtggctcgcacctggaatccctgtgctttgggaggctgacacaggaggatcacttgagcccaggatcttgagaccagcctgggcaacacagcaagaccccttctttacaaaatttaaaaaattagcagggcctactggcacacacctgtagtcctagctactcaggaggctgaggtgggaggatcgcttgagcccaggagttcgaagttgcagtgagctatgattgcaccactgcactccagcctgagcaagagagaaagaccttgtctctaaaaaataataataatagttagggataatgcatttaaatctgtctcactgaaatagtaagaatgaaatcaaagtgctcaagacagcattttttaaaaatctaacctactttatctaaatcttttaggatactccaatttttcatttgaaaaagtagacctgatttgaataactaaaataattgatattgtcatagttaagatttatgagatgcttactttgtgccaggtacttttctagctagtttgtttgtttgtttgtttgccaattgcactggttgaaacctccaggacactgttgactagaacagcagacaattttgtcttgctcctgtacttagggagaaagcattgactctgtcctcattaatgtatgatgttagctgaggatttttcatagataccctttttcaggttaaagaaattcttttctattcctcatgtgttcggtattttgatgaagaaagagtgtttgattttgtcaaatgcttttccgaagcatataatttttaattatatggggtaaaaattatatgatcacataattagataatcatataattatataattatattagattattttatatgtaatttttatataaatatatatctatgtaatttatatattaatattatataactataaataattatataacatagctataaataattatgtaactatgaataattacataacatagctataaataattatgtaactatgaataattacataacatagctataaataattatgtaactatgaataattacataacatagctataaataattatgtaactatgaataattacataacatagctataaataattatgtaactatgaataattacataacatagctataaataattatgtaactatgaataattacataacatagctataaataattatgtaactatgaataattacataacatagctataaataattatgtaactatgaatacataacatagctataaataattatgtaactatgaataattacataacacagctataaataattatgtaactatgaataattacataacatagctataaataattatgtaactatgaataattacataacatagctataaataattatgtaactataaataattacataacatagctataaataattatataactataaataattacataacatagctataaataattatgtaactataaataattatataacatagctataaataattatataactataaataattacataacataactataaataattatataaccataaataattatattacataactataaataattatattacataactaaataattatattacataactaattatattacataactataaataattatattacataactataaataattatataactataaataattatattatataactataaataatatgatcacattaaattgtataatcatatattatcatatcattataattatattatatatgtatatatcatatataattacatataattatataagcataattatatgcttccttaattctttattttattaatacacatattaatagaataaaggattaaaattatatgatcacattataattatatggttatataattatatggttatatatgattaattatttacctttgagtcctggggaatattatatggttatatatggctaattatatggttatataattataatgtgatcttataattatatgattacataattatataactataatgtgatcatataactttaatcctttattctattaatatgtgtattacattgatggatgattagatgttaaactagccttacattcctgggataattaccacctggtcagggtatataatccttttaatatgttgcaggacttggtcggctagtatttttttgaggatttttgcattcattttcataagggattttggtctgcagttttcttttcttgtgatgtctatttctgggtttggtgtcagagtaacactggcctcgtagaagatttggaaagtgcttcctctttttccgtttttggttttgtgaactattaacactaatcctccaaaagttaaccatagagctaccatatgacccaggtatatacccaaaacaaatgaaaacgatgtccacaaaaaaacttgtacatgatgcagccataaagaataaggagatcggccgggtgcggtggctcacacctggaatcccagcactttgggaggccgaggcgagcagatcacaaggtcaagagattgagaccatcctggccaacatggtgaaaccccgtctctactaaaaatacaaaagttagctgggcgtggtcgtgggtgcctgtaatcccagctacttgggaggctgaggcacaagaatcgcttgaacctgggaggtggagtttgcagtgagccaagatggctccattgcacttcagcctggccacagagcgagactccatctcaaaaaaataaaataacaagatcatgtcctttgcagcaatatggatggagctggaggccattattctaagtgaattaatgcaggaacagaaaatcaaataccgcatgttctcacttataagtaggagctaaacattgggtacccatggacacaaacaaggaaacttcagacaccgaagcctgcttgagggtggagagtgggaggagggcgaggataaataaacgacctatagagtactgtgctgatgaccagggtgacgaaataatctgtacaccaaaccgccgcaacatgcattttacctacataacaaacctacaaaatgtacctctgaacctaaaataaacgtttagaaaaatgttgtacatgaatgctcatagaagcagtatttagaatagtcaaaaattggaaacaatgcctatcactgatgaatgaataaacaaaacgtaatatatccacaatgaaatgttattcagccataaaaaggaacgttaagagaccattcagtcattatttatttatttagaaacactctgtcacccaggctggagtgcagtggtgccatcttggctcactgcaacctctgctctctgcttcctgggttcaagcaattctcatgcctcagcctcccgagtagctgagattacaggcatgcgccaccacacgcagctcattttttgtgtgtttttagtagagaaaggatttcaccacactgggcaagctggtctcaaactcctgatatcaaatgatccacccgcctcggctcccaaagtgctgggattacaggtgtgaaccactgcacctggcctcattcagccattttaaaatgctgcaatataggtcttgctctgttgcccaggctggagtgcagtagtgcaatcacagctcactgcagtctcgacctcctggactcaagcgatcctcccacctcagtctcccaagtaactgggaatacaggtgtgagccaccacacccggctatttttttattttttgtagaaatggggtcttgctatgttgctcaggctggtctcaagctcttggtctcaagcaatcctcccacctcggcctcccaaagtcctggtgtgagccactgtgcctggcacaaccttccatttttgtttcattgtttgaatgtgtctgattgtgtgtatcttccttgagttgaaattttggggatctaagaccgtgttcattttctccaccactgtatcttcagagccaaccacagaccctatcactaaagaaacacttaatattgttgacgtaggaaggaagtgaggaagtggtgaggagggatggaatagatttacataactgttccatatctccaaaaactgatgcattttttttaatctctcttttttcagctgctggctccaaccagaaaagggatttatatggggcttccttggacctgtctgcgccatcttctctgtgagtgacatcatctgagcatcctcgctgccccgctgagggtcattagaaaaacaagataataaagatggtgacaagagcaggaatgtcccctgggttgtcatgggttgggttaggtttcctaagaccactcttgaatcttcaaactcaacactgttactcaatatttaagaaaaagacttacgtgtataattcatattagacaggctaggatgaagagataatgggcttcaggcccggtgtggtggctcacgcctgtaatcccagcactttgggaggccgaggcaggcagatcacttgaggtcaggagttcaagaccagcctggccaacatggtgaaaccctgtctctactaaaaatacaaaaattagccaggcgtggtggtgggtgcctgtactcgggaggctgagacaggagaatcgctcgaacccgggaggcagaggtggcagtgagctgagattgcaccgccacactccagcctgggcaacagagcaagaccctgtctgaaaaaaaaaaaaaaagagataacaggtttcaaaatctattcaacaaatcttctgtggttttctgaaggtgaatttagttctctttctggtgactctctggattttgaaaaacagactctcctccctcaatagtgaagtgtccaccctccggaacacaaggtaagatggagaagggggtgataaccacacagacatgtatggttcccaagagccaagccatgtgcctcagcagccactgaggtcccttctcagggtcttttgaagggacccagaaaaaacagacgcagccatccttctatggcagccatcacagattcagtggtatcctgttgagaccccatgcaacatgttttgtccatgtctaatctcagtttgtgaatcccagagcaacaggaagaatcttcattgactggtaaatggtatatatacaaaataggatacgattcgatcacaaaacagaatgaaaccatgtcatttgcagcaacatggatgaaactggaggtcactctcttaagtgaaataagccaggcacaaaaagacaaataccacaggttgtcacttacatagagaggagccgaagaagctgatcttgtggaggcagaaagtagaatgataaaagttagccgggcatggtggcaggcacctgtagtcccagctactcgggaggctgaggcaggagaaccgcttgaacccaggaggcggaggttgcggtgagccgagatcacaccactgcactccagcctgggcaatagagtgagactctgcctcaaaaactaaaaataaaaataaagtagaatgatagattccagagtctggaaagggtatgtgagtgggcaaggcgatgaagagaggttggttaatgggtacaacatacagtcagatagaaggaataagttataatattggatggcagagtagggtgactctagttcacaatatgttgtatatttcaaaatagctagaggggagaatttgaagtgttcccaacacatacaaatggtagacacgcgaagtgacggataccccaaatactctgacttaatcatgacacactctatgcatgttaacaaaatatcacatatgtccccacaaagatgtacaaacattacgaatcaataaactaaaaggttaaaaacttctttggacttttgtcagcagtcctataacaaaagcacaaagaaggccgggcatggtggctcatgcctgtaatcccagcactttgggaagctgaggggcgggggcagatcacaaggtcaggagttcgagaccagcctggccaaagagaccagcctgaccaacgtggtgaaaccccgtctctactaaaaatacaaaaattagctgggcgtggtggcgggtgcctgtaatcccagctactccagaggctgaggcaggagaattgtttgaacctgagaggcagaggttgcagtgagccgagattgcgccactgcactccagcctaggtgacagagcaagactccaactcaaaaaaaaaagtgcaaagaacacgtacattttcttgcctgttcccacagcccagtctgcaccttcataccgtaccctcagttcaggctcctcatcacttctcatgcaatcctccctctgggaaaatcctaatcaacattaaatcctttacgggggccaggcatggtggctcacgcctgtaatcctaacactttgggaggccgaggtaggcggatcacttgaggtcatgagttcaagaccagcctggccaacatggtgaaaccccatctctactaaaaatacaaaaattagccaggcatggtggtgggcgtctataatcccagctactcaggaggctgaggtgggagagtcacttcacctgggaggcagaggttgcagtgagccaagatcacgccactgcactccagcctgggtgacagagggagattccatctcaaaaaaataaataaataaaaataaaaataattcctctacagggtttgagcagtttgttgttccaggcacccttgtgcaaaattaatgaactttcttctagattcctatcattatcctttccaaattttgtgtgtcatgcctggttgtattggtgatttgaagagactgtgtagttcatgaacacagaaatctctttgcatattcaaaaataatcctttttttttttttgagacagagtctcgctctgtcactcccaggctggagtgcagtggctctatctcgactcactgcaacctccgcctcctgagttcaagcaattctactgccccagcctcctgagtagctgggattacaggcgcccccccgaccacacctggctaatttttgtatttttttagtagagaccaggtttcaccatgttggtcgggctggtctcgaactcctgacctcaggtgatctgcctgccttggccccccaaagtgctgggattacaggcatgagccaccgtggccaaccccaggtggcatttctactgtgggctatagttgacagtaaatatctaagctgaccacagcccagtctgagaaatcatctacaggggagggcaggggactccatgggcacagatgaaatagccttgattctctttctctgggtgcatcaccagcctcctttcttactcaatccaggatgctggcatttaaagcgacagctcagctgttcatcctgggctgcacgtggtgtctgggcatcttgcaggtgggtccggctgcccgggtcatggcctacctcttcaccatcatcaacagcctgcagggtgtcttcatcttcctggtgtactgcctcctcagccagcaggtaccactgcccagctcccacccaggactcttcctgtcctcactgctctctgtgagctgacccagtacacactttgcctctgcaggtccgggagcaatatgggaaatggtccaaagggatcaggaaattgaaaactgagtctgagatgcacacactctccagcagtgctaaggctgacacctccaaacccagcacggtaagatcacgcattgctccagagcacttcactaaccgacccacctgaggagcatgtgcctatcacacaaggaaacctgggaatacagcaggcaatgccctagaaaggctcgcatctgagtacgccttgactcattaaccattagcaatgatctcagtttaaatgtttttttttaatcagtcatagcctgtcatcccagcatcactgtcatcccagcatttgggaggcctaggcaagaggatcacctg

SEQ ID NO: 22573 - DNA, 811 bp, Homo Sapiens
gtgagtgccttctagccttacccttcctctcgctcacgcctgtcttcaccagcttcatgtggctatcagaagaagagttagaaaaccccctacttggttatagtttcccaagaagggccttgtagctggtagcagaaatgccagttgcagaatgaggaggtggcaaagcagttaacacaatggatgtgacggtggatgtataaaaacaggtgtgtgaattcgtctgatgcctgactcccagcagcctcggccggttcatacatgtccatcagcttccaggctgcaggacatgccagcccagttaaagaggcttcacttgactgttttcctgagaaaaggaagctgccagctctcatttggctcactatgaaaagcctttaattaatctcttcaaacaagttatttccttaatccacaagcagtggttacacttgctttgcattcttgtctggttcctaactctagagcccttctccctggcttagccagtaagctgagcccctggctgcgttcagccggcccgcctgagagacactaggggaaatagcttttgtgggcaagcagggtggccggtggtgctcagcagtctttccagtggctgtgtccctcctccaaatgtggacaggccatgacagagtcttagcccaagtcccacagatccccaaaagttctgttgattgcttcaggggatcagtgaaaattagggaattttgtgtgttgctatatacattttttctggggagatgagcttctcattgagatctgtgactcagaatcgactaagccaccataagtctggatttctccccag

SEQ ID NO: 22574 - DNA, 363 bp, Homo Sapiens
caggtgcagctggtgcagtctggggctgaggtgaagaggcctggggcctcagtgaaggtctcctgcaaggcttctggatacaccttcatcggctactatatgcactgggtgcgacaggcccctggacaagggcttgagtggatgggatggatcaaccctaacagtggtggcacaaagtatgcacagaagtttcagggcagggtcaccatgaccagggacacgtccatcagcacagcctacatggagctgagcaggctgagatctgacgacacggccatatattactgtgcaagagatggccacctgggggaggcctacggtctggacgtctggggccaagggacaatggtcaccgtctcgagt

SEQ ID NO: 22575 - DNA, 5499 bp, Homo Sapiens
aatggcggaagtggcaccgttgccaggcagccgttgcctggcgtcgcggggcgtactctgcgctgggcgcgcggaggcctaggcgggaagctcgagcggcggcgccatggcccgaggtagcgcgcggctggcgggggtcccgaggatcccgggttccggggttccggggtccagggtcggcggccggagcgctcagggcccccgcctaggccctgaggccagagtccccgctcaggcagggtcccgtctgccgggcgcccaccctcgggctcccggagcttggcttccctcgggcgcccggcctcgtcccgccagcctagctggcgttggcgtcgccggggaaggcgcggagagccccggctcctgcctggtccccgaggcccggcccagccccgcagtggccccggctcgcgtggccgagtcccctgacgcccggcgcccgctccccgcagcgtggcagcacccgttcctcaacgtcttcagacacttccgggtggacgagtggaagcgctccgccaagcagggggacgtggccgtggtcacggacaagaccctgaagggcgccgtgtatcgcattcggggctcagtctctgccgccaactacatccagctccctaagagcagcacccagtctctggggctgacgggacgatacctgtatgtgctctttcggcccctgcccagcaagcacttcgtcatccacctcgatgtgtcctccaaggacaaccaagtcatccgtgtgtctttctccaacctcttcaaggagtttaagtctacggccacgtggctccagtttcccttggtcctggaggccaggacacctcagagagatctggtgggtttggccccctccggagcccgctggacctgcctgcagctcgatctgcaggacgttctcctggtctacctgaaccggtgctacggccatctcaagagcatcaggctgtgcgccagcctgctggtcaggaacctgtacaccagtgacctgtgctttgagcctgccatctctggggcccagtgggcaaagctgcccgtgactcctatgcctcgggaaatggcattccctgtgcccaagggagagagctggcatgaccgctacatccacgtccggtttccaagtgagagcttgaaagtgccttccaagccgattgagaagagctgttcccctcctgaggcagtcctcctggggccggggccacagcctctcccttgcccggtggcctccagcaaacctgtgcggttcagtgtgtctccagtggtccagacgcccagccccacagcccagtccggccgggccgccttggcacccaggcccttcccggaggtcagcctgtcccaagagcgctcagacgcctccaacgcggatggccccggtttccatagccttgagccctgggcccagctggaggcctctgacatccacacggctgctgccggcacccacgtgttgactcacgagtcggctgaggtgcccgtggcccgcaccggctcctgcgaaggcttcctcccagacccagtcctgaggctcaagggcgtcatcggctttgggggccacggcaccagacaggccctgtggaccccagacggggcggctgtcgtgtacccctgccatgcggtcatcgtcgtcctgctcgtggacacgggggagcagcgcttcttccttggccacacagacaaggtctccgccctggcgctggatggcagcagctcactattggcctcggcccaggcaagggcccctagtgtgatgcggctctgggacttccagaccgggcggtgcttgtgcctgttccggagcccaatgcacgttgtctgctctctcagcttctctgacagcggggcccttctctgcggggttggcaaggaccaccacgggaggacggtaacagggccctggctgcgggttggggtggggctgtcctgatgcacgcagacagctggaagggtcttggttttctgaaactccagcttcatgtgaccctgggtccctgctctgtgtcctccctgtggtggggctccctgcactctggtgttcatgccgcccccgtgccctgcacaaaaaccaccaccagcagctcacatttcacgtctcggcttttcggccatcggagtcggtttaagccagcgtttacacacctcgcctcgttctctctgctggtgatgcggttgtaagattttcacgtggcagagcccctgcagctgacccacgcttgggcatcaatggcacctccacacagccgaagcacccggcatcttggtgggggcacctttttaaacattttttttttgagagagagccttgttctgtcacctaggctggaatgcagtggtgcaatcatagctcactgcagccttgaccccctccctgacctccccgccagctggactccagccatcctcctgcctcagcttcccagatagctgggccacaggcgtgtgccaccacacctggctaactttttttttttttttttttttgagatggcatcttgctctgtcgcccaggatggagtgcagtggcgcgatcttagctcactgcaagctccgcctcccaggttcacaccattctcctgcctcagcctccccagtagctgggactacaggcgcctgccaacatgcctggctaattttttttttttgtatttttagtagagataggctttcaccttgttagccaggatggtctcacgttttgtttttttaactttttgtagagatagggtttcattacattgctcaggctggtctcaaactccagggctcaagcagtcctcccacctcagcctcccaaagtgctgggatcacaggcatgagccactgtgcccagccacgagctgctttttatccaccttccggcttgcgggggggtttgtacttctctgcgaatgggttgcagtgctcagcattgcgggtctctgtagaagtcccaaagcttcaggatgagaagatggaggggctggtttccttccactctccacggccgcacgctcagaggctggtctccgcatgagagaaaagccacctccgggtggggctcggctgggccttgcagaatcgaggtggccccgactggccctgccgtgcgggctcagcctgggcttgttgcagatggtggtggcctggggcaccggccaggtgggcctcggtggcgaggtggtcgttctggcaaaggcgcacactgactttgacgtccaggccttccgggtcaccttttttgatgaaaccaggatggcgtcgtgcgggcagggcagtgtgcggctctggcggctgcgtggcggggtgctgcgttcctgccccgtggacttaggggagcaccacgcgctgcagttcaccgacctggccttcaagcaggcccgggacggctgcccggagccctcggctgccatgctcttcgtgtgcagccgcagtggccacatcttggagattgactgtcagcgcatggtcgtgcggcatgcccgccgcctgctccccacacggactccaggcggtccccacccacagaagcagaccttcagctcaggccccggcattgccatcagcagcctcagcgtctccccggccatgtgtgctgtgggctctgaggacggcttcttgcggctctggcccctggacttctcctcggtgctcctggaggcaggtgatgctgtgggcacgctctcccaactccgggagagcctcgcctggatgctggggcggggaaggcccagtccccggggctctgctgtcagccgccctggctcctggctgcacagggtgccacggggccaagtggcatatccagagccctggggcggctgatgccagggcggcccgcggggcagcctcacggaagggcccggtgggacgtgggtagtgtgtgaagcccctcagcctgggtcccgcctagcctaagagtggtggcctcgagggagctgcatcttgcagccgtgtggagcctgggactttgagcagcagggagtgcatttgctggggtgtcggggacccgaagcctgagcatgcggctcaccccggggtggccctggaggcccctgaccccaccccacccacagagcacgagggccccgtcagctcagtctgtgtcagccccgatggcctccgtgtgctgtctgccacctcctcgggccacctgggcttcctggacacgctgtcccgggtgtaccacatgctggctcgctcccacaccgccccggtgttggccctcgccatggagcagaggcggggacagctggccaccgtgtcccaggaccgtaccgtccgcatctgggacctggccaccctgcagcagctatacgacttcacatcatcagaggacgccccgtgcgctgtcaccttccaccccacaaggccaacctttttctgtggctttagcagtggggccgtgcgctccttcagcctggaggccgctgaggtcctggtggaacacacgtgccaccgaggagctgtcaccggcctgaccgccacccctgacggccgcctgctcttcagctcctgctcccagggctccctggcccagtacagctgtgcggacccccagtggcatgtcctccgagtggcagcggacatggtatgcccggatgcccccgcgagccccagcgccctggcagtcagcagggatggccgcctgctggcctttgtgggaccctccaggtgcacagtgacagtcatgggctcggcctcccttgatgagctgctgcgagttgacatcggcactctggacctggccagcagccgcctggactcagccatggctgtgtgctttggccctgcagctctgggccacctgctggtgtccacctcgtccaacagagtcgtggtgctggatgctgtgtcgggccgcatcatccgggagctgcccggtgtccaccctgagccctgcccctccttgacgctcagtgaggacgcccgcttcctgctgattgccgccggccggaccatcaaggtgtgggactacgccacacaggccagcccaggcccccaggtgtacatcggccactcggaacccgtgcaggctgtggccttctctcctgaccagcagcaggtcctcagcgcaggggacgccgtcttcctctgggatgtcctggcccctactgagagcgaccaaagcttccccggggcccccccagcctgcaagacaggcccgggcgcaggaccgctggaggacgcagcgtccagggccagcgagctcccccggcagcaggtccccaagccatgtcaggcatctccaccacggctgggcgtctgtgccaggcctcccgaaggtggcgatggcgccagggacaccaggaattcgggggccccacgcaccacctacctggcttcctgcaaggccttcacgcctgccagggtcagctgcagcccccactctgccaagggcacttgcccgcctcccgccagcggtgggtggctgcgtctgaaggctgtcgtcggttacagcgggaatgggcgggccaacatggtctggaggccggacacaggcttctttgcctacacgtgcggccg

SEQ ID NO: 22576 - DNA, 9768 bp, Homo Sapiens
cctcctcctcctcctccacctcctcctccttctccccctctttctccccctctttctctcttctttctcccccgtccccccgccccctccccccaggcctgatgagcaggtctcgagcctccatccatcgggggagcatccccgcgatgtcctatgcccccttcagagatgtacggggaccctctatgcaccgaacccaatacgttcattccccgtatgatcgtcctggttggaaccctcggttctgcatcatctcggggaaccagctgctcatgctggatgaggatgagatacaccccctactgatccgggaccggaggagcgagtccagtcgcaacaaactgctgagacgcacagtctccgtgccggtggaggggcggccccacggcgagcatgaataccacttgggtcgctcgaggaggaagagtgtcccaggggggaagcagtacagcatggagggtgcccctgctgcgcccttccggccctcgcaaggcttcctgagccgacggctaaaaagctccatcaaacgaacgaagtcacaacccaaacttgaccggaccagcagctttcgccagatcctgcctcgcttccgaagtgctgaccatgaccgggcccggctgatgcaaagctttaaggagtcacactctcatgagtccttgctgagtcctagcagtgcagctgaggcattggagctcaacttggatgaagattccattatcaagccagtgcacagctccatcctgggccaggagttctgttttgaggtaacaacttcatcaggaacaaaatgctttgcctgtcggtctgcggccgaaagagacaaatggattgagaatctgcagcgggcagtaaagcccaacaaggacaacagccgccgggtagacaatgtgctaaagctgtggatcatagaggcccgggagctgccccccaagaagcggtactactgtgagctctgcctggatgacatgctgtatgcacgcaccacctccaagccccgctctgcctctggggacaccgtcttctggggcgagcacttcgagtttaacaacctgccggctgtccgtgccctgcggctgcatctgtaccgtgactcagacaaaaagcgcaagaaggacaaggcaggctatgtcggcctggtgactgtgccagtggccaccctggctgggcgccacttcacagagcagtggtaccctgtaaccctgccaacaggcagtgggggatctgggggcatgggttcgggagggggagggggctcggggggtggctcagggggcaagggcaaaggaggttgcccggctgtgcggctgaaagcacgttaccagacaatgagcatcttgcccatggagctatataaagagtttgcagagtatgtcaccaaccattatcggatgctgtgtgcagtcttggagcccgccctgaatgtcaaaggcaaggaggaggttgccagtgcactagttcacatcctgcagagtacaggcaaggccaaggacttcctttcagacatggccatgtctgaggtagaccggttcatggaacgggagcacctcatattccgcgagaacacgcttgccactaaagccatagaagagtatatgagactgattggtcagaaatacctcaaggatgccattggagaattcatccgtgctctgtatgaatctgaggaaaactgcgaggtagaccctatcaagtgcacagcatccagtttggcagagcaccaggccaacctgcgaatgtgctgtgagttggccctgtgcaaggtggtcaactcccactgcgtgttcccgagggagctgaaggaggtgtttgcttcgtggcggctgcgctgcgcagagcgaggccgggaggacatcgcagacaggcttatcagcgcctcactcttcctgcgcttcctctgcccagcgattatgtcgcccagtctctttgggcttatgcaggagtacccagatgaacagacctcacgaaccctcaccctcattgccaaggtcatccagaacctggccaacttttccaagtttacctcaaaggaggactttctgggcttcatgaatgagtttctggagctggaatggggttccatgcagcagtttttgtatgagatctccaatctggacacgctaaccaacagcagtagctttgagggttacatcgacttgggccgagagctctccacactgcatgccctactctgggaggtgctgccccagctcagcaaggaagccctcctgaagctgggtccactgccccggctcctcaacgacatcagcacagctctgaggaaccccaacatccaaaggcagccaagccgccagagtgagcggccccggcctcagcctgtggtactgcgggggccatcggctgagatgcagggctacatgatgcgggacctcaacagctccatcgaccttcagtccttcatggctcgaggcctcaacagctctatggacatggctcgcctcccctccccaaccaaggaaaagccacccccaccaccgcctggtggtggtaaagacctgttctatgtaagccgtccacccctggcccgttcctcaccagcatactgcacgagcagctcggacatcacagagccagagcagaagatgctgagtgtcaacaagagtgtgtccatgctggacttacagggtgatgggcctggtggccgcctcaacagcagcagtgtttcgaacctggcggccgtaggggacctgctgcactcaagccaggcctcgctgacagcagccttggggctacggcctgcgcctgccggacgcctctcccaggggagtggctcatccatcacggcggctggcatgcgcctcagccagatgggtgtcaccacagacggtgtccctgcccagcaactgcgaatccccctctccttccagaaccctctcttccacatggctgctgatgggccaggtcccccaggcggccatggagggggcggtggccatggcccaccttcctcccatcaccaccaccaccaccatcaccaccaccgaggtggagagccccctggggacacctttgccccattccatggctatagcaagagtgaggacctctcttccggggtccccaagccccctgctgcctccatccttcatagccacagctacagtgatgagtttggaccctctggcactgacttcacccgtcggcagctttcactccaggacaacctgcagcacatgctgtcccctccccagatcaccattggtccccagaggccagccccctcagggcctggaggtgggagcggtgggggcagcggtgggggtggcgggggccagccgcctccattgcagaggggcaagtctcagcagttgacagtcagcgcagcccagaaaccccggccatccagcgggaatctattgcagtccccagagccaagttatggccccgcccgtccacggcaacagagcctcagcaaggagggcagcattgggggcagcgggggcagcggtggcggagggggtggggggctgaagccctccatcaccaagcagcattctcagacaccatccacattgaaccccacaatgccagcctctgagcggacagtggcctgggtctccaacatgcctcacctgtcggctgacatcgagagtgcccacatcgagcgggaagagtacaagctcaaggagtactcaaaatcgatggatgagagccggctggatagggtgaaggagtacgaggaggagattcactcactgaaagagcggctgcacatgtccaaccggaagctggaagagtatgagcggaggctgctgtcccaggaagaacaaaccagcaaaatcctgatgcagtatcaggcccgactggagcagagtgagaagaggctaaggcagcagcaggcagagaaggattcccagatcaagagcatcattggcaggctgatgctggtggaggaggagctgcgccgggaccaccccgccatggctgagccgctgccagaacccaagaagaggctgctcgacgctcaggagaggcagcttccccccttgggtccaacaaacccgcgtgtgacgctggccccaccgtggaatggcctggcccccccagccccaccacccccaccccggctgcagattacggagaacggcgagttccgaaacaccgcagaccactagcccacccagcatcagagaccttctcttcctttcctgtgcaccccaccctgtaacagcaccaaccaccaggattggacatcaccgaggaacagcgggattgcctccccgaatgcctccctgggaggcacactgattgcccacccccaccactgcaccatttccaggagggagagtggggaccctcagccgcccccttttccttcccattggggtgctgccctctctttgacccccagggacccttgccccaggacaccgcctaccccgtacagaccccttcactccggggtgctatccccatcctctgcctcatcgttcccctgagcactgggggacagaccctcacccccaccctgggggtgtggcacctccaaactttcaacttcagggtgatttttttagcagtaaccagagctgacaatctaactcccctccaccgccccattttggcctcccctgccccccttgttatggggaggggaccccgggtgagggggccctattaccccttgatttctcaggagcgtctgggggggctcagcacgcacaaactccttctccttctaccactcttaaatttactccctccccacccagaacccagatggggtggagggggccaccggggcagggagggggcggcaaggggggaatgggagttgtctccccttctccccacacctgatctgctctcggctggtcccagagcggggtgagggggcttatgcccccccctcccccagtgtgttgggtggggtggaattgaggttagggtgaggggtcagggtttaggagggtgtgtatgttgggaggacaggctagttgatctgtcctactctgacacacagtcccctctgccccttccttctctcttcttggtctctactcccagggggaggggggaacttactctaggaaaagccatgtctctctcccccagggtggggggacctgtgttggaggaggggtgttggggggcccccttccatgactctgtcccctgggggaggtaggacagggctgggcttccctctcatcctccccctcccaatctccttccacctccctccctcccgccagctccacgatttttcggtgtttctctgtacatagttttctggcgggataggggaggtaggatggatggggtttggggtgggtaggccatgggaggggagaagcccctccttggcaccccctcttccctgactgctgtcccctacccagccttgcccccttcatccttttgcgtttggtattgagactctcctagactctactcctctttcttttgtatggacagttccccttcagtcccatccccctacacatacacccagccggggccaaatttatacttatataaaagttgtaaatatgtgaaattttatccctgtgccctttccccacctcaggccctacccctggaccctccccaaccttccttctctcttctttggctgttgtaattatctggggtttgtactgtacatatccggggtgtgtgtgtgtgggctgggggcaacccttctgtacagagcttcctggccccctccccccccgcccctctgcttccctccccacccaccacctcaagggtagggagttgctcttcctacctgttttattttgttttctcgttctccctccccaccccactcccagccttatctatcccccctcactgtccccttttctccactcccagccccatttcctttttttctggagtgtgtggtgaaacagaaaaaaacatgtttaataaacggagattgttcttttatcgctgtgccgactttcttaggcagggctctccagacctgtacggtggtaagatctgctttctgaaaggaagctgacagcctgagaggaaaaccgtatatccccacctgatgccacactctcctcatagaatgtcactctcccctcccaatgagattttttatattttagagcaggagttttgcaccggccaaacttctccaatctaactctcccctcaccactgtgtcacttagtccgaggccaggaacagcggcgttatctgataaaagagttcatgtatatatccacatttatctcttttaaaaattacctagaaataaggtttctttaattgctggttaaaatgctcccgtgcagaaaacaggaaagaacctgcctggttccttagcaaatctgagttccagtcccaggtccactactattagctgagtgacgcttccagcccgtttcccccgcctggaaactgaggacggcaacccccaccctcgcagggccggtgggaagacacaaagtgatgtgggcaagtgccaggcccacatggtaagtacccaactaatctcgcccctctcaggacctaccgggggcgggtgctacacttaatcaccgggaaacgcagctttccggggcggctgacggcccaccccctccgaccgggctgttctctcccgggccctgcctctcggtcctctgcagcggggaggacttcagcagctccccgggacgcccgttgcgaggacaccctgggcctgtgccctcctactagcaccgccctcctcgtctgcagtagccaatcaacacgaggcttgtaggctgccgttcctcgattggctacggctctagctccgcccgccgcacttggcgacggtgtccggcggggaggcggcggcttccggtctgggacggagctgtagcggcactgtaactgcgagggcagcgccgcgtgtgtaacggcgggggcgtgtcggcgggaaggacaatcgggccgggactcgcggtgtccgggtgaccgcggcttcccgggagcagacctctgtgggcactgtgaggcggaacggagcggcggggcaggagctgttgtgggcaggtgaaggcaggctggtggctgaaggacctccttcttatcttccacaggggctggaagttaaaacccctgttggtgtttagtggtggtggttgttgttgttgtttgtttttgctttcttggtgtgcgggactgatttgcagaaaccgccactgacttaaaagtttccagttattgctcgtggggagggggttgtttgagaagatgtggctccctttatccagggcttctgtgacctccatctttttcctctgcagccttcatcccgcgtggagtctacccccaagcccttctcctcttcccaattcttgtcaccttcgaggaggccatggaaaccccaacacctttgccgcctgtacccgcctccccgacctgcaacccagccccacggacaatccagatcgagttcccacagcatagctcgtcgctgctggaatctctgaaccgccacaggctagagggaaagttctgtgatgtgtccctcctggtgcagggccgggaacttagggctcataaagcagtgttagctgctgcctctccttacttccatgacaagctgcttctgggggatgcgcctcgtctcactctaccgagtgtcattgaagccgatgccttcgaggggctgctccagctcatttattcagggcgtctccgcctgccactggatgctcttcctgctcatctccttgtggccagtggccttcaaatgtggcaggtagtagatcagtgctcagaaattcttagagaattagaaacttcaggtggtggaatttcagcccgtggaggaaactcctaccatgcccttctttccactacatcctctacaggaggctggtgcattcgctcttcgcctttccagaccccagtacagtcctctgcttctactgaaagccctgcttccactgagagccctgtgggaggggagggaagtgaactgggagaagtgctgcaaattcaggtggaagaagaagaggaggaggaggaagatgatgatgatgaggaccaggggtcagccacactctctcagactcctcagccccagagagtatcaggggtttttccccgtcctcatggaccccacccactgcccatgactgctactccccgaaagcttccagagggtgagagtgcaccacttgagcttcctgcccctcctgcactgccccccaaaatcttctacattaagcaggaacccttcgagcctaaggaggagatatcaggaagcggaactcagcctggaggagcaaaggaggaaaccaaagtgttttctggaggggacactgaagggaatggggagctagggttcttgttgccttcagggccagggccaacatctgggggagggggtccatcctggaaaccagtggatcttcatgggaatgaaatcctgtcagggggtggaggacctgggggagcaggccaggccgtgcatgggcctgtgaagctaggggggacaccccctgcagatggaaaacgctttggttgcctgtgtgggaagcggtttgcagtgaagccaaagcgtgaccggcacatcatgctgaccttcagccttcggccttttggctgtggcatctgcaacaagcgcttcaagctgaagcaccatctgacagagcacatgaagacccatgctggagccctgcatgcctgtccccactgtggccgtcggttccgagtccatgcctgttttctccgccaccgggacctatgcaagggccagggctgggccactgcccactggacttacaagtgactgctgaggctatacactagcttctagaacaagataaccactgctgctgatggatacttttccctcactgccatggcacaccagtcatggatcttgtaatcatgccaagagaatagatacattatggacctcttgttcttagatatgggcctctcagcctggcagatgtggaaactcaaatttctcgtcccactccaggttttggctagccaaccctgcaggaaagtggtttataggccattcatacttaagttgatcacttgcccatggtggacatttttgtggtggtgatgtccattaaggaaaccagattttcaattatttagtgagagaagagttagagcaaaagacagtggtaaatgttttattccgtctccatgaggaattgaaggagttggtctccacctagagatacatttgatttacagcttaagtaattcagaggctaagctctaagcttttttctctcattgctggaatgatttaagcagaagtccttttgtgtacttttaaaattgtatctttccaggagcccctcagattgtaccttgctttctcaccaatagacaccttcccgacacttttttaatgttgtagctgagcactttaacaagttgagcattccatgtttcattcttagaaccttctttaatagagggtcttccctcaacagcctgtgcctctggtctacctttgaccaccactgataactaatatattggtcacaatgactggaatgtgactagtgatctcaggagatggcactgtcctaaagtgctgtcagggtggcaccactgctctctgaacaacttaccttggtcagagggactcaggtttgggacagcacaagctgaaggctggagagtaacttgcatagtaggaccatacctcttcctttcccatcccacccacatatgatagacagcccctctgttgagatatggaggggacagatactggaatcgggggtgggacttgcagttacttaaaattttttaataaactgtgccctgaaacct

SEQ ID NO: 22577 - DNA, 1839 bp, Homo Sapiens
cgggcgtgcggagcgggcgacagtggcgtgggatctgcctctctgcgagcagctgggagcggcggcggcggcgccatgagcgggggcaccccttacatcggcagcaagatcagcctcatctccaaggcggagatccgctacgagggcatcctctacaccatcgacaccgaaaactccaccgtagcccttgccaaagttcgatcctttggtacagaagacagaccgacagatcgtccaataccacctcgagatgaagtctttgaatacattatattccgtgggagtgacattaaagaccttactgtttgtgagccaccaaaaccacagtgttctttgcctcaagacccagctattgttcagtcctcactaggctcatcgacttcttcattccagtccatgggttcttatggacctttcggcaggatgcccacatacagtcagttcagtccgagttccttagttgggcagcagtttggtgctgttggtgttgctggaagctctttgacatcctttggaacagaaacatcaaacagtggtaccttaccccaaagtagtgcggttggttctgcctttacacaggatacaagatctctaaaaacacagttatctcaaggtcgctcaagccctcagttagaccctttgagaaaaagcccaaccatggaacaagcagtgcagaccgcctcagcccacttacctgctccagcagctgttgggagaaggagtcctgtatcaaccaggcctttgccatctgccagccaaaaggcaggagagaatcaggagcacaggcgagctgaagtacacaaagtttcaaggccagaaaatgagcaactcagaaatgataacaagagacaagtagctccaggtgctccttcagctccaaggagagggcgtgggggtcatcggggtggcaggggaagatttggtattcggcgagatgggccaatgaaatttgagaaagactttgactttgaaagtgcaaatgcacaattcaacaaggaagagattgacagagagtttcataataaacttaaattaaaagaagataaacttgagaaacaggagaagcctgtaaatggtgaagataaaggagactcaggagttgatacccaaaacagtgaaggaaatgccgatgaagaagatccacttggacctaattgctattatgacaaaactaaatccttctttgataatatttcttgtgatgacaatagagaacggagaccaacctgggctgaagaaagaagattaaatgctgaaacatttggaatcccacttcgtccaaaccgtggccgtgggggatacagaggcagaggaggtcttggtttccgtggtggcagagggcgtggtggtggcagaggtggtaccttcactgcccctcgaggatttcgcggtggattcagaggaggtcgtgggggccgggagtttgcggattttgaatataggaaagacaacaaagttgctgcatagtctacaaacaagtctctgaaaataggtgaatttctagctcttcatggtcctgaacattgatttcagtctttgcaaagaatgaagaagtgaattcgctgtacatttgtcaccagcactgggtttttgttttttgtttgtttttccgcttaatttcaaagataaaatgcagttacttttgggggtggaaggctcatcttaaaacatgagcattaaatatatttggaatagcagaaggttaagtaatttcttatgtatagttaaactaaagcagtacttcagtgggacttaacaagtattttttcatcactgaaaggttttttttttttatcactaaattgtatttggcaattgcaagttgcctgcagatagggc

SEQ ID NO: 22578 - DNA, 1646 bp, Homo Sapiens
aggcggaggacttcggcgcggctcctcctgggtgtgaccccgggcgcgcccgccgcgcgacgatgagggcgcggccgcaggtctgcgaggcgctgctcttcgccctggcgctccagaccggcgtgtgctatggcatcaagtggctggcgctgtccaagacaccatcggccctggcactgaaccagacgcaacactgcaagcagctggagggtctggtgtctgcacaggtgcagctgtgccgcagcaacctggagctcatgcacacggtggtgcacgccgcccgcgaggtcatgaaggcctgtcgccgggcctttgccgacatgcgctggaactgctcctccattgagctcgcccccaactatttgcttgacctggagagagggacccgggagtcggccttcgtgtatgcgctgtcggccgccgccatcagccacgccatcgcccgggcctgcacctccggcgacctgcccggctgctcctgcggccccgtcccaggtgagccacccgggcccgggaaccgctggggaggatgtgcggacaacctcagctacgggctcctcatgggggccaagttttccgatgctcctatgaaggtgaaaaaaacaggatcccaagccaataaactgatgcgtctacacaacagtgaagtggggagacaggctctgcgcgcctctctggaaatgaagtgtaagtgccatggggtgtctggctcctgctccatccgcacctgctggaaggggctgcaggagctgcaggatgtggctgctgacctcaagacccgatacctgtcggccaccaaggtagtgcaccgacccatgggcacccgcaagcacctggtgcccaaggacctggatatccggcctgtgaaggactcggaactcgtctatctgcagagctcacctgacttctgcatgaagaatgagaaggtgggctcccacgggacacaagacaggcagtgcaacaagacatccaacggaagcgacagctgcgaccttatgtgctgcgggcgtggctacaacccctacacagaccgcgtggtcgagcggtgccactgtaagtaccactggtgctgctacgtcacctgccgcaggtgtgagcgtaccgtggagcgctatgtctgcaagtgaggccctgccctccgccccacgcaggagcgaggactctgctcaaggaccctcagcaactggggccaggggcctggagacactccatggagctctgcttgtgaattccagatgccaggcatgggaggcggcttgtgctttgccttcacttggaagccaccaggaacagaaggtctggccaccctggaaggagggcaggacatcaaaggaaaccgacaagattaaaaataacttggcggcctgaggctctggagtgcccacaggctggtgtaaggagcggggcttgggatcggtgagactgatacagacttgacctttcagggccacagagaccagcctccgggaaggggtctgcccgccttcttcagaatgttctgcgggaccccctggcccaccctggggtctgagcctgctgggcccaccacatggaatcattagcttgggttgtaaatgttttcttttgttttttgctttttcttcctttgggatgtggaagctacagaaatatttataaaacatagc

SEQ ID NO: 22579 - DNA, 3201 bp, Homo Sapiens
atgacctcttaccgggagcggagtgccgacctggcccgtttctacactgtcaccgagccccagcgacacccgaggggctacacagtatataaggtcaccgccggggttgtttcacgaagaaatccagaggatgtccaggagataattgtatggaagagatacagtgattttaagaaactacacaaagaactatggcaaattcacaaaaacttattccgacattcagagttgtttcctccatttgctaaaggaatagtgtttgggcgatttgatgaaactgttatcgaagagagaagacaatgtgctgaagacctgctacagttctctgccaatattcctgctctttacaatagtaaacagcttgaagactttttcaagggtggaataattaatgatagttctgaattaattggtcctgctgaagctcactcagattccctcattgatacctttcctgagtgtagtacggaaggcttctccagtgacagtgatctggtatctcttactgttgatgtggattctcttgctgagttagatgatggaatggcttccaatcaaaattctcccattagaacttttggtctcaatctttcttcggattcttcagcactaggggctgttgcttctgacagtgaacagagcaaaacagaagaagaacgggaaagtcgtagcctctttcctggcagtttaaagccgaagcttggcaagagagattatttggagaaagcaggagaattaataaagctggttttaaaaaaggaagaagaagacgactatgaagctgcttctgatttttataggaagggagttgatttactcctagaaggtgttcaaggagagtcaagccctacccgtcgagaagctgtgaagagaagaacagccgagtacctcatgcgggcagaaagtatctctagtctttatgggaaacctcagcttgatgatgtatctcagcctccaggatcactaagttcaaggcccctttggaacctaaggagccctgccgaggagctgaaggccttcagagtccttggggtgattgacaaggttttacttgtaatggacacaaggacagaacagactttcattttaaaaggtctaaggaaaagcagtgaatacagcaggaacagaaagaccatcatcccccgctgtgtgcccaacatggtgtgtctgcataagtacatcatctctgaggagtcagtatttcttgtgctgcagcatgcggaaggtggcaaactgtggtcatatatcagtaaatttctaaacagaagtcctgaagaaagctttgacatcaaggaagtgaaaaaacctacacttgcaaaagttcacctgcagcagccaacttctagtcctcaggacagcagtagctttgaatccagaggaagtgatggtggaagcatgcttaaagctctgcctttgaagagtagtcttactccaagttctcaagatgacagcaaccaggaagatgatggccaagatagctctccaaagtggccagattctggttcaagttcagaagaagaatgtactactagttatttaacattatgcaatgaatatgggcaagaaaagattgaaccagggtctttgaatgaggagcccttcatgaagactgaagggaatggtgttgatacaaaagctattaaaagcttcccagcacaccttgctgctgacagtgacagccccagcacacagctgagagctcacgagctgaagttcttccccaacgatgacccagaagcagttagttctccaagaacatcagattccctcagtagatcaaaaaatagccccatggaattctttaggatagacagtaaggatagcgcaagtgaactcctgggacttgactttggagaaaaattgtatagtctaaaatcagaacctttgaaaccattctttactcttccagatggagacagtgcttctaggagttttaatactagtgaaagcaaggtagagtttaaagctcaggacaccattagcaggggctcagatgactcagtgccagttatttcatttaaagatgctgcttttgatgatgtcagtggtactgatgaaggaagacctgatcttcttgtaaatttacctggtgaattggagtcaacaagagaagctgcagcaatgggacctactaagtttacacaaactaatatagggataatagaaaataaactcttggaagcccctgatgttttatgcctcaggcttagtactgaacaatgccaagcacatgaggagaaaggcatagaggaactgagtgatccctctgggcccaaatcctatagtataacagagaaacactatgcacaggaggatcccaggatgttatttgtagcagctgttgatcatagtagttcaggagatatgtctttgttacccagctcagatcctaagtttcaaggacttggagtggttgagtcagcagtaactgcaaacaacacagaagaaagcttattccgtatttgtagtccactctcaggtgctaatgaatatattgcaagcacagacactttaaaaacagaagaagtattgctgtttacagatcagactgatgatttggctaaagaggaaccaacttctttattccagagagactctgagactaagggtgaaagtggtttagtgctagaaggagacaaggaaatacatcagatttttgaggaccttgataaaaaattagcactagcctccaggttttacatcccagagggctgcattcaaagatgggcagctgaaatggtggtagcccttgatgctttacatagagagggaattgtgtgccgcgatttgaacccaaacaacatcttattgaatgatagaggacacattcagctaacgtattttagcaggtggagtgaggttgaagattcctgtgacagcgatgccatagagagaatgtactgtgccccagaggttggagcaatcactgaagaaactgaagcctgtgattggtggagtttgggtgctgtcctctttgaacttctcactggcaagactctggttgaatgccatccagcaggaataaatactcacactactttgaacatgccagaatgtgtctctgaagaggctcgctcactcattcaacagctcttgcagttcaatcctctggaacgacttggtgctggagttgctggtgttgaagatatcaaatctcatccattttttacccctgtggattgggcagaactgatgagatga

SEQ ID NO: 22580 - DNA, 2939 bp, Homo Sapiens
ccaaacagccgtggcccgcggtgtctggcgctcggtgggtgtggttgcccctagtttgaggcctgcccgattacccgcaagacttgggcagccccgggcgccgctccgaccacgacagggaaaggaaccttaatctcatctttaaaataaggagaattactgagtgacctgaaggacccttttcagctggaaagtctgaactgaccaacactggatgaatttgaccatttcttaggagactggaatgttaagtttctataaatgaatgaaccagttctctcttgtttggagcaatgctgaaattccaagaggcagctaagtgtgtgagtggatcaacagccatttccacttatccaaagaccttgattgcaagaagatacgtgcttcaacaaaaacttggcagtggaagttttggaactgtctatctggtttcagacaagaaagccaaacgaggagaggaattaaaggtacttaaggaaatatctgttggagaactaaatccaaatgaaactgtacaggccaatttggaagcccaactcctctccaagctggaccacccagccattgtcaagttccatgcaagttttgtggagcaagataatttctgcattatcacggagtactgtgagggccgagatctggacgataaaattcaggaatataaacaagctggaaaaatctttccagaaaatcaaataatagaatggtttatccagctgctgctgggagttgactacatgcatgagaggaggatacttcatcgagacttaaagtcaaagaatgtatttctgaaaaataatctccttaaaattggagattttggagtttctcgacttctaatgggatcctgtgacctggccacaactttaactggaactccccattatatgagtcctgaggctctgaaacaccaaggctatgacacaaagtcggacatctggtcactggcatgcattttgtatgagatgtgctgcatgaatcatgcattcgctggctccaatttcttatccattgttttaaaaattgttgaaggtgacacaccttctctccctgagagatatccaaaagaactaaatgccatcatggaaagcatgttgaacaagaatccttcattaagaccatctgctatcgaaattttaaaaatcccttaccttgatgagcagctacagaacctaatgtgtagatattcagaaatgactctggaagacaaaaatttggattgtcagaaggaggctgctcatataattaatgccatgcaaaaaaggatccacctgcagactctgagggcactgtcagaagtacagaaaatgacgccaagagaaaggatgcggctgaggaagctccaggcggctgatgagaaagccaggaagctgaaaaagattgtggaagaaaaatatgaagaaaatagcaaacgaatgcaagaattgagatctcggaactttcagcagctgagtgttgatgtactccatgaaaaaacacatttaaaaggaatggaagaaaaggaggagcaacctgagggaagactttcttgttcaccccaggacgaggatgaagagaggtggcaaggcagggaagaggaatctgatgaaccaactttagagaacctgcctgagtctcagcctattccttccatggacctccacgaacttgaatcaattgtagaggatgccacatctgaccttggataccatgagatcccagaagacccacttgtggctgaagagtactacgctgatgcatttgattcctattgtgtagagagtgatgaggaggaagaagaaatagcgttagaaagaccagagaaagaaatcaggaatgagggatcccagcctgcttacagaacaaaccaacaggacagtgatatcgaagcgttggccaggtgtttggaaaatgtcctgggttgcacttctctagacacaaagaccatcaccaccatggctgaagacatgtccccaggaccaccaattttcaacagtgtgatggccaggaccaagatgaaacgcatgagggaatcagccatgcagaagctggggacagaagtatttgaagaggtctataattacctcaagagagcaaggcatcagaatgctagcgaagcagagatccgcgagtgtttggaaaaagtggtgcctcaagccagcgactgttttgaagtggaccagctcctgtactttgaagagcagttgctgatcacgatgggaaaagaacctactctccagaaccatctctaggcaactatcaaaaagaagcagaagttcaagtggacaaatttatgtgaaaattcatttaacatataagctgaactctattatggggaatggatacaaaagcagagctcccatcttgactttcaattcctcatcagaagtactggcttctttagagagtagtaagcatggctgcctatgcttggagtcataagtgttatttggactataccctgagataagcttatagatcaagtttggctcccttgaaaagcatttctctcatgtgcgccctcagggcttccagcaggattgagtcaccctgacgatgaccggggagaagccgtgtgctcttcattattttcagctggaggacagagctcagtgcctgactgcctagggtctcatggactgtaggcagcctgccagtgaaggtcactggactctagcctacaacatgctgagctacagcccagaagccagacatgcctgtcttagctgacctgtttttggtccacttttgcccttccatgactaataaggaagatatgtgtgtatttcatacacacacaaggacctggattaaaaatccaaaaagtgattctcttctatgatttatttcaaactcatccatagataattcaagatttgtattcaaaataaacatagttttcacagttacaaaataaatcacctattttatctttagaaaaaaaaaaaaaaaaaaaaaaa

SEQ ID NO: 22581 - DNA, 1994 bp, Homo Sapiens
agttgggctttgaagaattccatcccactggcactgaggagaatatttctccgtcttgcttacccatctcccagttttttggaattttctctagctgttactccagaggattatgtttctttcaaagccttctgtgtacatctgtcttttcacctgtgtcctccaactcagccacagctggtcggtgaacaatttcctgatgactggtccaaaggcttacctgatttactccagcagtgtggcagctggtgcccagagtggtattgaagaatgcaagtatcagtttgcctgggaccgctggaactgccctgagagagccctgcagctgtccagccatggtgggcttcgcagtgccaatcgggagacagcatttgtgcatgccatcagttctgctggagtcatgtacaccctgactagaaactgcagccttggagattttgataactgtggctgtgatgactcccgcaacgggcaactggggggacaaggctggctgtggggaggctgcagtgacaatgtgggcttcggagaggcgatttccaagcagtttgtcgatgccctggaaacaggacaggatgcacgggcagccatgaacctgcacaacaacgaggctggccgcaaggcggtgaagggcaccatgaaacgcacgtgcaagtgccacggcgtgtctggcagctgcaccacgcagacctgttggctgcagctgcccgagttccgcgaggtgggcgcgcacctgaaggagaagtaccacgcagcactcaaggtggacctgctgcagggtgctggcaacagcgcggccggccgcggcgccatcgccgacacctttcgctccatctctacccgggagctggtgcacctggaggactccccggactactgcctggagaacaaaacgctagggctgctgggcaccgaaggccgagagtgcctaaggcgcgggcgggccctgggtcgctgggaacgccgcagctgccgccggctctgcggggactgcgggctggcggtggaggagcgccgggccgagaccgtgtccagctgcaactgcaagttccactggtgctgcgcagtccgctgcgagcagtgccgccggagggtcaccaagtacttctgtagccgcgcagagcggccgcgggggggcgctgcgcacaaacccgggagaaaaccctaagggtttcctctgccccctccttttcccactggttcttggcttcctttagagaccccggtaattgtggaacctagggaatggggaacccgctctcccagacctagggatcctgagagggagagactgcaatttctccaaagcttgccactttccagcctgtttccccaattcctctgtgctctcctagagctctgtctgaatcctcgcagccacacctaggtctgagaactcaggctttgagttactgatcttccttggattaggagaacaggtgttcctcctcccctctcctagcagccctaatgtctgacctagcctatcaagccttaggcgctggaagaacccttctcagacacgcaggacccaggtaaagtcaaagctttgcccttttgcccactgtctgctaccagggctcacccactgctgcacctctcttctgcacagctcctcccctgctacctgctgagccagattccccaggaatcttgaatgctttctctcctcttctccctttcctttcccagaaaaactgaggaaactggccccggaaaagcatgtctttggggttggttcctagaggcagaggttgaagatggaagagggagctctggagtgctaacttgaacaccaagggtgctactcatccctatggtatcatatcatgaatggactttactagtggggcaatgactttcctagacaataacccgagggactccagatacataccccgaaggtctaggaaatacgttaagggcagattacagtcatttcctaccctttaaaggtaacttctcccttctcctgacctacttcctcctagcaa

SEQ ID NO: 22582 - DNA, 2436 bp, Homo Sapiens
atggcggattccagcgaaggcccccgcgcggggcccggggaggtggctgagctccccggggatgagagtggcaccccaggtggggaggcttttcctctctcctccctggccaatctgtttgagggggaggatggctccctttcgccctcaccggctgatgccagtcgccctgctggcccaggcgatgggcgaccaaatctgcgcatgaagttccagggcgccttccgcaagggggtgcccaaccccatcgatctgctggagtccaccctatatgagtcctcggtggtgcctgggcccaagaaagcacccatggactcactgtttgactacggcacctatcgtcaccactccagtgacaacaagaggtggaggaagaagatcatagagaagcagccgcagagccccaaagcccctgcccctcagccgccccccatcctcaaagtcttcaaccggcctatcctctttgacatcgtgtcccggggctccactgctgacctggacgggctgctcccattcttgctgacccacaagaaacgcctaactgatgaggagtttcgagagccatctacggggaagacctgcctgcccaaggccttgctgaacctgagcaatggccgcaacgacaccatccctgtgctgctggacatcgcggagcgcaccggcaacatgcgggagttcattaactcgcccttccgtgacatctactatcgaggtcagacagccctgcacatcgccattgagcgtcgctgcaaacactacgtggaacttctcgtggcccagggagctgatgtccatgcccaggcccgtgggcgcttcttccagcccaaggatgaggggggctacttctactttggggagctgcccctgtcgctggctgcctgcaccaaccagccccacattgtcaactacctgacggagaacccccacaagaaggcggacatgcggcgccaggactcgcgaggcaacacagtgctgcatgcgctggtggccattgctgacaacacccgtgagaacaccaagtttgttaccaagatgtacgacctgctgctgctcaagtgtgcccgcctcttccccgacagcaacctggaggccgtgctcaacaacgacggcctctcgcccctcatgatggctgccaagacgggcaagattgggaaccgccacgagatgctggctgcggagcccatcaatgaactgctgcgggacaagtggcgcaagttcggggccgtctccttctacatcaacgtggtctcctacctgtgtgccatggtcatcttcactctcaccgcctactaccagccgctggagggcacaccgccgtacccttaccgcaccacggtggactacctgcggctggctggcgaggtcattacgctcttcactggggtcctgttcttcttcaccaacatcaaagacttgttcatgaagaaatgccctggagtgaattctctcttcattgatggctccttccagctgctctacttcatctactctgtcctggtgatcgtctcagcagccctctacctggcagggatcgaggcctacctggccgtgatggtctttgccctggtcctgggctggatgaatgccctttacttcacccgtgggctgaagctgacggggacctatagcatcatgatccagaagattctcttcaaggaccttttccgattcccgctcgtctacttgctcttcatgatcggctacgcttcagccctggtctccctcctgaacccgtgtgccaacatgaaggtgtgcaatgaggaccagaccaactgcacagtgcccacttacccctcgtgccgtgacagcgagaccttcagcaccttcctcctggacctgtttaagctgaccatcggcatgggcgacctggagatgctgagcagcaccaagtaccccgtggtcttcatcatcctgctggtgacctacatcatcctcacctttgtgctgctcctcaacatgctcattgccctcatgggcgagacagtgggccaggtctccaaggagagcaagcacatctggaagctgcagtgggccaccaccatcctggacattgagcgctccttccccgtattcctgaggaaggccttccgctctggggagatggtcaccgtgggcaagagctcggacggcactcctgaccgcaggtggtgcttcagggtggatgaggtgaactggtctcactggaaccagaacttgggcatcatcaacgaggacccgggcaagaatgagacctaccagtattatggcttctcgcataccgtgggccgcctccgcagggatcgctggtcctcggtggtaccccgcgtggtggaactgaacaagaactcgaacccggacgaggtggtggtgcctctggacagcatggggaacccccgctgcgatggccaccagcagggttacacccgcaagtggaggactgatgacgccccgctctag

SEQ ID NO: 22583 - DNA, 1477 bp, Homo Sapiens
atgaaccacaagagcaagaagcgcatccgcgaggccaagcggagtgcgcggccggagctcaaggactcgctggattggacccggcacaactactacgagagcttctcgctgagcccggcggccgtggcggataacgtggaaagggcagatgctttacagctgtctgtggaagaatttgtggagcggtatgaaagaccttacaagcccgtggttttgttgaatgcgcaagagggctggtctgcgcaggagaaatggactctggagcgcctaaaaaggaaatatcggaaccagaagttcaagtgtggtgaggataacgatggctactcagtgaagatgaagatgaaatactacatcgagtacatggagagcactcgagatgatagtcccctttacatctttgacagcagctatggtgaacaccctaaaagaaggaaacttttggaagactacaaggtgccaaagtttttcactgatgaccttttccagtatgctggggagaagcgcaggcccccttacaggtggtttgtgatggggccaccacgctccggaactgggattcacatcgaccctctgggaaccagtgcctggaatgccttagttcagggccacaagcgctggtgcctgtttcctaccagcactcccagggaactcatcaaagtgacccgagacgaaggagggaaccagcaagacgaagctattacctggtttaatgttatttatccccggacacagcttccaacctggccacctgaattcaaacccctggaaatcttacaaaaaccaggagagactgtctttgtaccaggaggctggtggcatgttgtcctcaatctcgacactactatcgccatcacccaaaattttgccagcagcaccaacttccctgtggtatggcacaagacggtaagagggagaccaaagttatcaaggaaatggtataggattttgaagcaagagcaccccgagttggcagtcctcgcagactcggttgaccttcaggagtccacagggatagcttccgacagctccagcgactcttccagctcctccagctccagttcgtcagactccgactcagagaggattagggacacttgtggaggccgggctcacccctgagcagataaagagactctccctgaggtgctttcagcgtaagcttttggcagccacccaactcagttctcgcatcttctgctcctaccttctcctctgtcttctttgaatttggatattccttccctggtccaagctcctatcttcggtcaaatgctgtttttactgcttcctaaggatagattatcaagaaatttaacagctcggccagctcagtgaaacactgaagctaatgggatgttgggtaagaaggttctgtgctgtctcattgaaaaccgagccagtcaaccacaaggctggcagggtgtgatccttgtaacgtcttgtgtctgttacctcacggatgtcggtaaggagtttc

SEQ ID NO: 22584 - DNA, 5627 bp, Homo Sapiens
gcggccgccgccgccgctgcctcggggttcccgctggctcccgagcccgccgccctgctggccgtgcccggcgcccggcgagaggtcttcgagagcacttccttccagggcaaggagcaggcggccgggccgtcgcccgcggcgccgcacctgctgcaccaccaccatcaccacgctcccctcgcccacttccccggcgacctggtgcccgctagcctgccctgtgaggagttggccgagccgggccttgtgcccgccgcagcagcgcgctatgcgctgcgcgagatcgagatcccgctgggggagctgttcgcccgcaagtccgtggcgtcctcggcgtgctcgacgccgccgcctggccccggccccggcccttgccccgggcctgcctccgcttcgcccgcgtccccctcacccgctgatgtggcctacgaagagggcctggcgcgcctcaagatccgcgcgctggagaagctggaggtggaccggcggctggagcggctgagcgaggaggtggagcagaagatcgcgggccaggtgggccggctgcaggccgagctggagcgcaaggcggccgaactggagactgcgcggcaggagagtgcgaggctcgggcgcgagaaggaggagctggaggagcgcgcgtctgagctctcccgccaggtggacgtgagcgtagagctgctggcctcactcaagcaggacctggtgcacaaggaacaggagctgagccgcaagcagcaggaggtggtgcagatcgaccagttcctgaaggagacggcggcgcgggaggccagcgccaagctgcggctgcagcagttcattgaggagctccttgagcgggctgaccgtgccgagcggcagctgcaggtcatcagcagcagctgtggcagcacgcccagcgccagcctgggccgtggaggtgggggcggtggtgctggacccaatgcccggggcccaggcagaatgcgagaacaccacgtgggcccggccgtgcctaacacatatgcagtgtcacggcatggctcctctccgagcacaggggcctccagccgtgtgccagccgcatcccagagctcaggctgctatgacagtgacagtctggagctgcccaggccagaggagggggcccctgaggacagtggccctgggggcttgggcacacgggcccaggctgccaacgggggctcagagcggacccagccccctcgcagctcaggcctgcggcgccaggccatccagaactggcagcgcagaccccgccgacacagcactgagggggaagagggtgatgtctccgacgttggctcccgaaccactgagtcagaggctgagggcccgttggatgcgccccgccccgggcctgctatggctgggccattgagcagctgccggctctcagcccgccccgagggaggcagtgggcggggtcggcgagcagagagggtcagcccctcacgctccaatgaggtcatcagcccagagatcctgaagatgcgagctgccctcttctgcatcttcacctacctggacacgcgcacactgctgcatgctgccgaggtctgccgggactggcgcttcgtggcccgccaccccgcagtctggacaagggtgctgcttgagaatgcccgtgtctgctccaagttcctggcaatgctggctcagtggtgcacccaggcccactctctgacgctgcagaacttgaagccccggcagcggggaaagaaggagagcaaggaggagtatgcccggagcacccggggctgcctggaagctgggctggagtccctgctgaaggcagctggggggaacctgctgatcctgcgcatctcccactgtccaaacatcctcaccgaccgctcgctctggctggccagctgctactgccgtgccctgcaggctgtcacgtacaggagtgccacagaccccgtgggccatgaggtcatttgggccctgggcgcaggctgcagagagatcgtctccctccaagtggcaccacttcacccctgccagcagcccacacgcttcagtaaccgctgcctgcagatgattggtcgctgttggccccacctgcgggccctgggggtcgggggtgccggctgtggggtgcagggcctggcatcactcgcgagaaactgcatgcggctgcaggtcctggagcttgaccacgtgtcagagatcacccaggaggtggcagcagaggtctgccgggaaggcctgaagggactggagatgctggtgctcacggcgactcccgtcacccctaaggccctactgcacttcaacagcatctgccggaacctcaagtccattgtggtccagattgggattgcggattatttcaaagagcccagcagccctgaggcccagaagctgtttgaggacatggtgacaaaactccaggctctgcgacggaggcccggcttctctaagattctgcacatcaaggtggaaggcggctgctaacccgggtagggggcggcagggcccctgccagccccacaccagggcactctctttggacctcagagggaccctggtttggactagacctttggaggccgagtgttatccctggcttctggagggggactgtcaagtctcctgtcctcctcctggagcagcagagcaacaggcctgacccagggcactgcctccccagtacaggggcttggacagaagctgccctccgacccccaccctaccccggctggagtagcctctggcacagccagtgaggagctgtcaccaccagcgcctggtgtcatcacctggaggatctgcaataaccacccagtggctcctcagctgttctggctggcctctccttcctgaggcccagcctcctggtcaggagcatctggggccccaagccaatgggggctccacaaggcagctcagacttggcaaggagggctcttctcctcaaccttgctgcagccttctgggggcaccccttcagacagcctgcccaggctgtggatccacatttcctgggggtaccacagccagacctaggggcctgggcacgtggtcagccaaaagctgggggcagcagtacagtggggtagtgggggtgggtttggaaaggaaacagtcacccagaacttctccccaggatgagaccacccttccaaggtgggggattgccagggggagaaaacttatttattgctgtaagacaggacccctcctcccaacctcataccccaccgcacaccagagctaaattcaaagctgaaaggcgcacgtttctatacctacattcattcctgagggaccctccagagggtcaaggtcccagccccaggcagccctgtcacagtgagaagtagttcctgtccttaaggaatttccttctaatccaggtgcttgggcaggaacccgatggccttcgggtcaccaaggctgtctgggagggaggcacagggccgccctctgtgctgaggccgtggaggaagccaggaggagggtggcttgctttgcttccttgtctaattagcttgcttgaagatgtggccttggcagggagccagacccatggggccaaggaagaggaagagcatcctcaatagactcactcccccttccttggtctccacgggccccgtggactgagggctgcattggggtcttctgcctaggggaagtgctggacctgagctggagccacttggcttagaagccacaggattcacttttcactggcctttgcagtccccaaaggatcaggtctcagaaccaaggctccaaaggctgaggtctccccagttcctcctctcagaactcccacagtagctcagaggccgggggtcctgccaactttcatttggaaagttctttcgaacatctaaactagatctatcttagggtttctttctctcctagataggatcagctcccagccctagccattaggctgctggtcctggcgggggatggggtcccctcgttacccagtccttcccagggacccaacttcctaacacaacctggcttggacatgaagaccctcccccaggttaccttgtaaagagtcctccagagctgggatcccatgggcgcagcagcacacccagctcccatggcgtcactccctagctctgtcccagcttttgctatcattgctgacttttcctcctgtggctcattctgtccctgccctttgaaaacctaaaataccaagggtgtcatgctggcaactccctgcccagtcctgcacaaagccttggctgtgtgtggcaccccttgcctcctaccccagagcagctggctccattggcttctccctgcaccagccctgtcctcaggggtcaggaaaaagcagcacagctttctttcctctcctccagaggcctggaagggaggtggaggtccagtaagggcctggctgccttggatttcttggtcctgccttgccaactgcaccctgtagctcctgctccctgtgaccccagaaccagaggtgctgccttccctgtctcctagacaaagcacaaagggatgccctgcttggcttgagcctgcccaactgaaggattttctctgccccagggaccttccatccctgaatacaaggctctaggcaacttctctctgggtggtacacactagaatgcctggcattagccctagaaaggaggttggggtgtatgggtagtgagctagggtgggagaaaggtggtgctgaaaggacagatgctagttgtagtttcactcactcattcattcattagtgcaacagtactgagcaccacctgcactagaggcagaggggtgaacaagatacccttctgcctggggggacgtccacttcccatgggtttggctatttccaggaaagcccctcagtcctccaccctgttctggctgtgtgtgaaggatgtgtgtgagcaggcccaatcctttgcagcaagaatgagaggtcagagtattccattgcacacgcaccctggggctgacagacttgtgccccctagccttcatgcatgcccaagcactggcagctttgcagcccctgccccaccagccccttgacgctcttcttttgttctctcctcggggatgagctctgctgctgagtagggagcttttgcttgctgggaggctctatgcatggatttttttggtgaccatacagctagggctgaggatgggaacagggacagagggcctggctatccctagaagcacttcatccatctttacccacccaaacgggatcccttcacatctcatacccagtaagatgcaagaaaggaatatctgagagcaagcagccctgctccaggggccccaggtatgtgtagaggcccagtgggggtggccacttggtgtttctaccaccccctgccatccagtctggccccagtacctacctgggaggttggtgtacttggcttaagtacttcatgctttattcaggctgcttccccacagcaccggcaggaaatgaaggtgcacttatatgcatccctgcaggaataaagagtgggtggcctgcccagcccagcaccacagcctttccccagccaggagagaccacctaaggatcaaggcagctcctgttttcttggttctgtgacactcgagtctgagccagcccctcaggaattgcctcaaaagag

SEQ ID NO: 22585 - DNA, 5549 bp, Homo Sapiens
ggcggcgcgcaagggtcggcgtcgcacgtgtgaaaccggggaacccatggaagccgagtccggcgacacaagttccgagggcccggcccaggtctacctgcccggccgggggccgccgctacgcgaaggggaggagctggtcatggacgaggaggcctatgtgctctaccaccgagcgcagactggcgccccctgtctcagctttgacatagtccgggatcacctgggagacaaccggacagagcttcctcttacactttacttgtgtgctgggacccaggctgagagcgcccagagcaacagactgatgatgcttcggatgcacaatctgcatgggacaaagcccccaccctcagagggcagtgatgaagaagaagaggaggaagatgaagaggatgaagaagagcggaaacctcagctggagctggccatggtgccccactatggtggcatcaaccgagttcgggtgtcatggctgggtgaagagcctgtggctggggtgtggtcagagaagggccaggtggaggtgtttgcgctgcggcggcttctgcaggtggtggaggagccccaggccctggcagccttcctccgggatgagcaggcccaaatgaagcccatcttctccttcgctggacacatgggcgagggctttgcccttgactggtccccccgggtgaccggtcgcctgctgaccggtgactgtcaaaagaacatccacctctggacacctacggacggcggctcctggcacgtggaccagcggccattcgtgggccacacacgctctgtggaggacctgcagtggtcaccgactgagaacacggtgtttgcctcctgctcagctgacgcctccatccgcatctgggacatccgggcagcccccagcaaggcctgcatgctcaccacagccaccgcccatgatggggacgtcaatgtcatcagctggagccgccaggagcccttcctgctcagtggcggggatgatggggccctcaagatctgggaccttcggcagttcaagtctggttccccagtggccaccttcaagcagcacgtggcccccgtgacctccgtcgagtggcacccccaggacagcggggtctttgcagcctcgggtgcagaccaccagatcacacagtgggacctggcagtggagcgggaccctgaggcgggcgacgtggaggccgaccccggactggccgacctcccgcagcagctgctgttcgtgcaccagggcgagaccgagctgaaggagctgcactggcacccgcagtgcccagggctcctggtcagcacggcgctgtcaggcttcaccatcttccgcaccatcagcgtctgaggcgtcccactggctctgatcttgcttcctgcttggaaactgaagtcgaattgggctcccctggaaggggttcattcaggtctgttgactgagactggccggcctgtgggctgccgtgatggattctgtttgacgtattgttctctagaaggcctggctctgatccagtgacccctctcaccaaagaactcggtttaaccagggctctgtaagaccactcccacccagagacttgtgtggcctggtgtggcctgtgtgtcggattccttcctgtcagctgtgacccatttgacctgtgtccccagaacccagttttttgtttgtttgtttgagacggagtcttggtctgtcgcccaggctggagtgcagtggcacgatcttggctcactgcaacctccgcctcctgggttaaagtgattctctcagctcagtctcccaggtagctgggattacaggcatgtgccaccacaccccgttaatttttgtatttttagtagagacggggtttcaccatgttggccaggctggtctcaaattcttgatctcaagtgatctgtccgccccggcctcccagagtgctgggttgggattacaggcgtgagccaccgcgtccggctcaggacccagttttggctgctggttcccagcaggggactcgggggatatacagtggctgcaccaaattggaggtgtgggttcctccaacacaatttgcttctgcccgttgtcttcctgccagctgggtttggccaggatttctccgtgtgggggctacatgcgaccctctcccctcctccctgactttagaggctggtgctgtgtcgggaggaaggtcagggctcctgagcagcaataaaggaccaggaagaggcctgaggtgtatttgagactctggtcctttggccacagccctatgaggaaacggggtgtggggggagtttgggggtggggaggaatttggcaccagctgcccccaggccgctaggctgggggaggccactgggagtccagtgcaacccaaccttccgcccactgggtgccgccgcgttctgccttctctaagtgtccttccatctggaactcactctggcttagtgaaaggggcctcatccctgacccccaccagcttatgaaggcttcacctcagggaactctggaccccccatttctccctccgtccatctcccctttatcacgtttctttctttcttctctgtgtccccctctttcagagtctcccgtcccccactgccagtctccctgccccctagtcgctgtctcgctcctccgccgccgtctcctgtccagcctgcctgggctgtggcccagccgctctgcctggctggcctccctggctccccctctgcggctctgagctagccccacccccggcccccctccatccagcctctgatccatctgtggactccgaggtcgggtgcccgtcacacggcccctgggaccaaggacagactacagcccctcagcacccacagaggcttcccctcagccctagccgaggagcccccagcggagggcatgggggtgggccgccccaacaggtacgtgcctccatgcaaggcaccgctgagccatcccctcctgctctgctgcgtcgcccccatccacccctgccccagcatccctgtcctcagcttgtccccttcaagaaggccttgtcttcccatcagtgacaggctcagcgccaggagaatccacccccaggttcagtgcctccaactctcaccccatccccattttatgcattttctcactggcttccatcctttcagagaaaccctctcagtctgtctgtctctgtctctgtctctctcccccatctctgtctctcccatctctctctgcctctctctgtcttcacaatttcatctccccatgtcgccatttcttaaaacatttcttttctccttttcgttttcccaattgccctgtccgcctctatcttctctgtccccctccatctaggtctctgtccccccctctctctgggtctctgtccccctctgtctctgagtctctatcctctcaaggtctctgttcccctctctctgggtctctgtcctctctcaaggtctctgtccctttctctctggatcaatgtccctttcctgctgccctctctgggtctctgtccccctctctctcagggtccctgtcctgcttggtccctgtactttttcttggggcaccctctcaacacccctcctcctgcctatctctgcatctctttgtctttctgtagtctctgctttccaacctgctgtccagcccccaccagtaggtggggagtggtggggaacacccctggtttcggaagagtgagagtgttgatttgggagggtgagggtggggcctgggggcggggcttcttggcctcagattagacagtgactttgacacgaagttgaagcaccttaagccctgtatctcctttatatggaaacattaagctgctctcgcaggtcaggtggaggatccctttccctcccgccctgcttttgctaggggaggggggtgccctgagcctgagtcgcagccagcctgggagctgggccatgttggccgcagatggccccctggtgaaggttcccgttggctttgggaagtagacaacgggtctgcctcacggggctgaggtgggactggaggatttcgagggcagaactctgggaaggaaagaaaggcttaggacccaaccagcattccccctggcactgcgggggcctggccagctcatggcgttccctgagcctgttccccaactgtgaaagggggtgatgatcttcacctcccggcatcctgagcggccaaggtgagcagtggggtctgagagtccagtgggggctgtgggcatgtcgggagctcatcacgaggcctcgtacataccaggtgtgtttgaaaccagagtgctcttgagaagactgtggtttgtcactcgggccgtggctcccaggaggcctgggtgggaggctagcttttgccactcctctccccactggctgagagacctgcgacaagggactaacctcagccccagttggcttttctgtgaaaagccaggtcccttcatcaaagggctttggtgagagatgggcaagtgggggtgagaggcccaggctggggcctggggagcacaggtcagtgtcagtgcccacctgcccccccagcccacgggggtggttcctgagggtggagtcagtgctgagtggggatccccaggctggggagggctgcaggtgtagatgctgcatcctgatgttgacctccaggccgcccccttgggcaacgagcctatttcccctttttgggagaacagtctctaacatgcagggttgtcaggggtgagatagagtcaaggttggggtacactgtgggcactggacacagccaggctggtcccctcacctcagccttgcctctgtcaagtgggcctaatgaaccctcgcgaatggccaggctgcctgcgtggttgtgggaagcaggtgcagggctttgggagacccagttggtgccaaacttgacattgtctcatggtcttctttccaaatggagtgtgccaggccctgccaagaagcccctgaggatccccaggttccagcacaaattatttaacccctggaatggtttgtcctgatccagccagttcctgggaagttccccaccacagggccaagcgtttggtaacgttgcagtgaaccctgaaggcaatgaggggtggggtccatgcccagccctttcctttggtccaccctgacaggctgctgcgattccctccatttcttttcttcctttattttttatttttaattatttatttattttttagagacagggttttgctgtcttccccaggctggttctcaaacccctggcctcacgcattcctcctgagttggactcccaaagtgctgggattacaggtgtgagccaccgcacctgccctcttttttttttttttttctttaagagacagggcacgactccgtctcaaaaaaaaaaaaaaaagaaaagaaaagaaaaaagttaaaaaaaaaaattacccaggagtggtggtgtgcacctgtagtaatcccagctactcaggaggttgagacaggagaatcgcttaaacttgggacgcggagattgcagtgagccgggatcgtgccactgcactccagcttgggcgacagagcgagactctgtctcc

SEQ ID NO: 22586 - DNA, 5700 bp, Homo Sapiens
gatgaggaggcaccttccaagcaatgtgtttctgtaggagtgtcacaggtcacaactttaaagccagctttgtccacccagaaggcccagccctgtgagacatgtagctcacttctgaaggacattctacacctggctgagcatgacggaacacaccccaagcgtacagccaagctttacctgcaccaaaaggagcatcttagagagaagctcaccagaagtgatgaagggaggccttcgtttgtgaatgacagtgttcacctggcaaagaggaacctcacatgcatgcagggtggcaaggattttactggtgattcagatcttcaacaacaggctcttcacagtgggtggaagccacacagggacactcatggtgtggaggcctttcaaagtggacagaataattacagctgcacccaatgtgggaaagacttttgccaccaacatacactgtttgagcaccagaaaatccacacagaggaaaggccttatgagtgcagtgaatgtggcaaattgtttaggtacaactctgaccttattaaacatcagcgaaatcatactggagaaaggccttataagtgtagtgaatgtggaaaagccttcagcctcaaatacaatgttgttcaacaccagaaaattcacactggagaaaggccttatgagtgcagtgaatgtgggaaagcttttcttagaaagtctcacctacttcagcaccagaggattcacaccaggccaaggccttatgtgtgtagtgaatgtgggaaggccttccttacacaggctcaccttgttggtcaccagaaaattcatactggagaacggccttatggatgcaatgaatgtgggaaatactttatgtacagttcagcactcattagacatcagaaagttcacactggagaaaggcctttttattgctgtgaatgtgggaaattctttatggacagctgcacactcattattcaccagagagttcatactggagaaaaaccttatgaatgcaacgaatgtgggaaattctttagataccgttccacactcattagacatcagaaagttcacactggagaaaagccttatgagtgtagtgaatgtgggaagttctttatggacacttccacactcattattcatcagagagttcatactggagaaaagccttatgaatgcaacaaatgtgggaaattctttaggtattgcttcacactgaatagacatcagagagttcactctggagagaggccttatgaatgcagtgaatgtggcaaattctttgtggacagctgtacactgaagagtcatcagagagttcacactggagaaagaccttttgaatgcagcatttgtgggaaatcctttagatgtcgctccacacttgatacacatcagagaattcacactggtgaaaggccttatgagtgtagtgaatgtgggaaattctttaggcacaactcaaatcatattagacatcggagaaatcactttggagaaaggtcttttgagtgcactgagtgtgggagagtttttagccaaaattcccacctcattcggcaccaaaaagttcacactagggaaagaacttacaaatgcagcaaatgtgggaaattttttatggacagctccacactcattagtcatgagagagttcatactggagaaaagccttatgagtgcagtgaatgtgggaaagtctttagatacaactccagcctcattaaacatcggagaattcacactggagagagaccttatcagtgcagtgaatgtggaagagtctttaaccaaaattctcatctcattcagcaccagaaagttcacaccagataaagaatgtatatataaagcagatggggaaagacttcacacagaaatctactctgatttagcactgggacctacgttttaaaaaaagtattcttgtagaatacagataacataaaatctaacatcttaaccatgttaaagtgtatagttcagtaccgttaagtcattcacattgtgcaatgaatatctagaagtcttttcaacttatgaaactaagtctataccttttaaaaccttattcctcactccatccagcctcttgacaagcaccgctctgtatgaattttactagtccgggtacctcatataagaaaacttaagttttggtcttcttgtggtttattttgtggcttattttgcttaacgttatatttttaaggtttcatgttctaatccattagaatttccatcctttttaaaggctgaataaaattctgttagtcatgtgttgcttaacagtggggaagtgtcctgagaaaagtgttattaggtgattttctttctttttttggtggtggggggattgcgtgaatgcctaggctgtatggtatatcctatagcaccttgctacaaacttgtatagcatattactgtactgaatactgtaggctgttggaacacatggtaagtaattgtttttaagtatatctaaacagaaaaggtacagtaaaaatacagtataaaagaaaaaatgatagactcacagagaacttaccatgaatggagcttacagtactgcaagttgctctaggtgagtcagtgagtggtaagtgaatgtgaaggcctaggttgttactgtgctgtagactttatagacattgtgtacttagacgacaatacatttttatttttattattatttttgagacagaatcttgctctgttgcccagactagagtgcagtggtgcaatcttggcttcctgcaacctcctccacctcctggttcaagcagttctgcctcagcttcccaagtgtctgggattacaggcatgcaccaccatgccccgctaatttttgtatttttagtagagaacggggtcttaccatgttggccaggctggtctcaaactcccgacctcaagtgagccactcgctttggcctcccaaagtgctgggattacaggcatgagccaccgcacccggccggttttaccatttttagagccaagctttactatatatttgatatttgttctttcttcaaccttagctgaattcacattcctctgatagaaggtgttttcaaactgatgccgttcttagtgcctcaaactagatcctgttcatacttgttagaacaagttattacaaattcactttggtgtaaaaaattgaaatccatacataattttttttttttttttgacagagtctcactaacgctaggttggagtgcagtggcatggtctcggctcattgcaacctccgcctcctgggttcaagcagttctcctgcctcagcctcttgagtagctgggattacaggtgcccacaatcacgcccagctaatttttgtatttttagtggagatgggttttcactctgttggccaggctgctctcgaactcctgacctcaggtgatccacctgcctgggcctcacaaagtgctgtgattacaggcttaagccaccacccctggccaattttttcataatatacatttttttctcatttttcatgaaacttttgaagacccctcatattctagatattccttctcagatatgtggttttcaaatactttctcccattgagtctttttccttttcactctgtccattatgtccttttttacacaggaattttgaatttaaatggagtctaatatatctgttttataagtctttgatgcatttgagttcattttagcaacttaattcttttgcgtgtggatatccagttttttttttttaacatcaaaagaataatgtttttgcctagcattaaggcccttggtagaggcttgtcagttacaattttggagcagcagattaagtccacactcccaaccattttccttatcaggctctcaaactctgggccacaatatgtaagacccaatcaccccaggatcaggaatcagatatctagggacagcttctgtgcccaggagcttgtaaaattattccattggtcaatgcacaggggtccctgaaaacctagctaaccccaatttacatggcacacacaagctgccccctaagctccagcttgctgttatcttgggttccctcataactcttgcagccctgcctatgtccttaggtttcaagctgtaagtagcaaagtggtctacattttatgattatcattgtgacatgtcctgacatcagaaaaacacctttgtatgttattactatacaaccagcagaatattatgagtgcagcaaatgttagaaagtattcagcctaacttcactgagcaagagtaagttcatcctggagaaagtccttaggaatgcaggcaatatactttttttcctttgtcaacaggtcaaaaacagcaaagctctatcgagcttgtcttactcaccctatttttttgttgctctgttttgttttaggcttttagcctgaagccatggttttgtttctgtctctagtggtaggtggacaagaggaatgagatgagaaaggagctttactggcccagctagaaacaaactaagaacccatgactgtattctttcccttggatgaccctgtgttagcttgttgagggagatctcagcctgaaattgaatctcacatccaaacatccacgcaagggagatttgttgtaattgtcagatatatggtaaatttttgtgaatgatgttgcactttctgacctgcctggggcctttccagagttaagttgctgaaagtgtgcattacagaagactcctgctattagctgtcatggtgccacaatgtgcatcaccttagtcaccttaaattacttagagagtgataaggtctggacttctggttaaatgtttttaaaaaatggggggtgggggggtggtgcatagattgctgtgttctctacctttatctggaatattcagtcatttgttccctttgggggcctcattcccagtcccctgactggtttgggtgtggacatcacccagctttggacagagaacacacgccaacttcagctggcagcttgtagagatttccttttttcagaggtattattagttgtctgatactgataatgttgatgataaattttctaccttccaagcttcccaacccagtcaatttccacctaagcattgctgttttcttctgatgataaaggtcatattgtttaagctacatttactcttggggttctcttcactgtgtgctgcgggttgagaacaaaattaggctttgccagaatgaaaaagtgaatggtttttggggccttcaactttttgtgctcttgaagaaataagaagacaaaatagctttcaatccacatcaggcccaatttgcattgcttcgggagttcctgggaaagtgacggacttctatccaaaatcgcgccgtgaatttgattattggtagttctacagtcagcttgagggttgttggtttgacagttgtcagagcatgttgcagctgtatgaggtgggtatctgtacatatggatgtcccatattctccagcattgcataggaatagctggtgtctagatcctgcctcaggagctatgtgtcctgaatttaaaaatcaggtatgttatatccctggggcatgtcagacatacaacaacagtgcattagtccattttccattgcttacaacaaaataccttaaactgggtaatttgtaaagaaaataaatttcttactgttgttttgttgtgctttctttttttctagatcgcgagcggccgc

SEQ ID NO: 22587 - DNA, 3954 bp, Homo Sapiens
agggtctgtgtcaagagcggcaggggctgcaggagataagagaaacgggctgccgtggggtgtgtgtaggcttcagagacatgggatcacggaagactgaagcagaaacagtggattaagacttcctgagcgatagctggcactgccttccccacaatggcagaggtggtggctgaggtggccgagatgccaacacagatgtcaccaggggcagtggagatgtcaacacctatgtcggcagagatgatggagatgtcaacagaagtgactgagatgacacctggggaggcccttgcctcatccctcttcttccagcatcaccagttcatgtgctctgagtgtggcagcctctataacacactggaggaagtcctctcacaccaggagcagcacatgcttgctgtctcagaggaggaggcactgaccacacagaatgttggcctggagccggagctggtgccgggtgctgaggggcccttccagtgtggtgaatgcagccagctcatcctctcccctggggagctcctggcccaccaggatgcccacctccgagagtctgcaaaccagatccaataccagtgctgggactgccaggagctgttcccctcgcccgagctgtgggtggctcatcgaaaggcccagcacctttctgctacggtagctgagccaccagtgccacctcctttgcctcccccaacaccactgcctccaccttctcccccatccgaagtcaagatggagccctatgagtgtcctgagtgctctaccctctgcgccacccctgaggagttcttggagcatcagggcacccactttgactccctagagaaagaggagcgcaatgggttggaggaggaggaagaggacgatgaggaggatgaagaagatgatgaagagatggaggatgaggaggccatggcagaggtcggtgatgatgctgtgggaggtgacgagtccacagctggctgggctcagggctgcggggactgtccccagcaccagccctcagcaggggctcgccggcaacaccggcggacggctcacagcccggcatctgccacccaccccttccactgcagccagtgtcagcgcagtttcagctccgccaaccggctgcaggctcatgggcgggcccatgttggtggcacacatgagtgtacaacctgctccaaggtcttcaagaaagcagcatcgcttgagcagcacttgcggctgcatcgcggggaagcccgctacctctgtgtagactgtggccgcggctttggcacagaactcacgttggtggctcaccggcgggcccacactgccaacccattgcatcgctgtcgttgcggcaagacgttcagcaacatgaccaagttcctctaccaccggcgcactcacgccggcaaaagcggggcacctcccacaggagcaacagctcccccagctccagcggagcccacccctccaccaccaccccctgccccacctgcccagctgccctgcccacagtgctccaagtcctttgcctcagcttcccggctgtcccggcaccggcgtgcagtacacgggccccctgaacggcgtcaccgctgtggggtttgtggcaagggcttcaagaagctgatccacgtgcgcaaccacctgcggacacacacgggtgagaggcccttccagtgccactcatgtggcaagacctttgcttctttggccaacctcagccgccaccagctgacccatacgggtgcacgtccctaccaatgcctggactgtggcaagcgcttcacacagagctccaacctgcagcagcaccggcggttgcacttgcggccagtcgcctttgcccgcgccccccgcctccccatcactggtctctacaacaagagtccctactactgcgggacttgtggccgctggttccgcgccatggcgggcttgcgactgcatcagcgggtccatgcccgagctcggactttgacgctacagcctcccagatcaccatctcctgccccacccccacctccagagcctcaacagactatcatgtgcacagagctgggggagaccatcgccatcattgagacatcccagccactggcgcttgaggacaccctgcagctgtgccaggctgcactgggggccagtgaagcaggcgggctcttgcagttggacacggccttcgtgtgacgcagctgaaaagcaacaacaaaagggtttggttgcaacagccagtgtgggtacctctggggagagaggacctcctctgacaaactggtctggtacccaccatgtgccaggatccaccctggcctctttttacccactgactccccagaacaacccttccaggcttctcttgtcatctttctctgcctgaggggaaactgaagctctgaaatgcgatgtgatctgtaccaggtcacccagctatgctgcaaagtgggttggccaaggccctttgcactgcatcaccctggtgcccagcaacatcaggtaaccttcactgagcaccaagcttatgccaggtctgtgctggccactctcatatacctcttcagatcctctgcttgtacccccagcccttgccttccctggattttgggcacccaggactttgctctgcctggtggagggtacttgatttctctgggcttccttcatctcaattctgacagtgtggaaggaaatctgtaggtacccaggtcctcagctccagactgggtgatgctggagacccaggagcaagtcagcacaggctctgcccacaggaggcatgcacaatctggtaggagaaacgcacaagtacagatagcttgctctctgagtgtgtctcattgattcattcagcctgtgtgtcctaaagcctcccttctcccatactgggtgatgctgggggcagagatgagtcaggcctaaggcttctctgggctgtgatggggatgtgcagggacagtgggatcccaggaaacagacctccatggtgggagatcaggagttaaggacttcctagagaaggtagtccctgaaggaaaagtaggaatctggcagtgaaagaggaaaagaacattccaggcagacagcactgcaagagggtgagctcttggtgtatttggagaccatccagttattcatctgactgcctacctgaggcaagcaccacacttaccactgtatgtgtactatgatcccaacaggcttgtgacatagatttcatattatccctgttgtatagatttttaaaactggtggctgggcgtggtggctcacgcctgtaatcccagcactttgggaggccgaggcgggcagatcacgaggtcgggagatcgagaccatcctggctaacacggtgaaaccccgtctctactaaaaatacaaaaaattggccaggagtggtggcgggcgcctgtggtggccagctactcaggaggctgaggcaggagaatggcgtgaacccgggaggcggagcttgcagtgagccgagatcgcgccactgcactccagcctgggcgacagagtgagactccctctcaaaagaaaataaaaataaaaataaactggccaggtgcggtggctcacgcttgcaatcccagtgctttgggagactgaggcaggaggatcacttaaggccaggagttcgagaccagcctgggcaacagcaagacctcatctctacaaaacttaaaagttagccaggcctggtggcacatgcctgtaatccgagtgctttgggaggctgaggcaggaggatcactcgagctcaagaattcaagacctgggcaagagagagagactttgtctctattaaaaataaaaatgattggccgagcatggtggtgcacaccagtattcccagctactctggaggctgaggcggaggcaggattgcttgatatgagggagattgaggctgcagtgagctgtgttcacaccactgcactccagtctgggcaacagtgcaagaccctgtcactt

SEQ ID NO: 22588 - DNA, 3260 bp, Homo Sapiens
catgcagacagcttgtcaagctgtgcagcatcaaagaggcaggagcaatgctgctatctgccacgggaaagaggagagtccatggagaagtggcagaccaggagcatatacaacgcagctgtttggtactatcatcactgccaggacaggatgccaattgttatggtgacagaagatgaagaggcaattcagcagtatggaagtgaaacagaaggagtattcgtgattactttcaagaattacctggacaatttctggcctgatttaaaagctgcccacgagctttgtgattctatccttcagtctcgacgggagagagagaatgagagtcaggagagccatgggaaggagtacccagaacatcttcccctggaagtgttagaagctgggattaaatctggacgctatatccagggaattctgaatgtcaacaaacacagagcccaaatagaagcttttgttcgacttcaaggagccagcagtaaagattcagatttagtcagtgacatcctaatccacgggatgaaggctcgaaaccgctcaattcatggagatgtggtagttgtggagctgcttcctaaaaatgaatggaaaggaagaaccgtagccctgtgtgagaatgactgtgacgacaaggcttcgggcgagtccccaagtgagcccatgcctacaggtcgagtggtgggcatacttcagaagaactggcgggattatgtggtgacatttccgtccaaagaagaggtccaatctcagggcaaaaatgctcagaaaatcctggttacaccttgggattacagaattcccaaaattcgaattagcactcagcaagcagaaaccctccaggacttcagggtggtcgtgcgcatcgattcctgggagtcaacatctgtgtatccaaacggacattttgtgcgtgttttaggaagaatcggagatctggaaggggaaattgcaaccatcctggtggaaaacagtatttcagttattcctttctcagaagctcagatgtgtgagatgccagtaaacacaccagaaagtccctggaaggtgagtcctgaagaggaacaaaaacgtaaagacttgaggaaaagccatctcgtattcagcattgaccccaaaggttgtgaagatgtggatgacacactctcagtcagaaccttaaataatggcaacctggaacttggggtccacatcgcagatgtaacacactttgtggcaccaaattcttacattgatattgaagctagaacaagggccaccacttattatctagcagatcgtcgctatgacatgctgccttccgtcctcagtgcagatttgtgttcccttctgggaggcgttgataggtatgctgtaagcatcatgtgggaactggataaagcctcttatgaaattaagaaagtgtggtatggcagaaccattattcgatcagcatacaaactgttctatgaagcagcccaagaactactggatggaaacttaagcgttgttgatgatattccagaattcaaagacttggatgagaagagcagacaagccaagctggaggagttggtgtgggcaattggaaagctgaccgacatagctcgccatgtcagagctaaacgagacggatgtggtgccctggaactggaaggggtagaggtttgcgtacagctagatgacaaaaagaacattcacgacctcatccccaagcagcccctggaagtccacgagacagtggctgaatgcatgatcctggccaaccactgggtcgccaaaaagatctgggagagcttccctcatcaggccttgctgcgccagcaccctcctccacaccaggagttcttttcagaactccgggaatgtgctaaagccaaaggcttcttcatagatacacggtccaataaaacactggctgattctctggataatgcgaacgacccccacgatcccattgtgaacaggctactgcgctccatggccacgcaggccatgtcgaatgctctgtacttctccaccggatcctgtgcggaggaggagttccatcattacggtcttgcattagataaatatacccactttacttctccaataagaagatattcagatattgtagtacaccgcttgttaatggcagccatttcaaaagataagaaaatggaaattaagggaaatctgttcagcaacaaagatcttgaggaattatgcagacatatcaacaacagaaaccaagcagcacagcattctcagaagcagtctactgagctcttccagtgcatgtacttcaaagacaaagaccctgccaccgaggagcgttgcatatctgacggagttatttattcaattagaacaaatggtgtgcttctatttataccaaggtttgggattaaaggtgctgcttatctaaaaaataaagatggtttagtcatctcatgtggcccagatagctgttctgaatggaaaccaggatcccttcaacgatttcaaaacaaaattacctctactacaacagatggggaatctgttacgttccatttgtttgaccatgtaaccgtaagaatatccatacaggcctcacgttgccattctgatacaatcagacttgaaataattagtaacaaaccatacaagataccaaatacagaacttattcatcagagttcccccttgctgaagagtgagttagtgaaagaagtaactaaatctgtggaagaagctcagcttgcccaagaagtcaaagtaaacatcattcaggaggaatatcaagaatatcgccaaacaaagggaaggagcctatacacacttctagaggagatacgggacctagctctcctggatgtttcaaacaattatggaatatgagaggctcttacttcactaagagctgtcatatgtgaatgttttacagtcttttcaaacttaacatttaatgtgtgtcactcagtgctctagtcgatcaggactgggtagctatttcgcatatatgtaaaatgttctcagccgggcacggtggctcacgcctgtaaccccagcactttgggaggctgaggcgggcggatcacgaggtcaggagattgagaccatcctggctagcacggtgaagcccagtctctactaaaaatacaaaaattagcccggcgtggtggcatgcgcctgtggtcccagctacttgggaggctgaagcaggagagttgcctgaacccgggaggaggaggttgcagtgagccgagatcgcgccactgcattccagcctgggcaacagagcgagactccatctc

SEQ ID NO: 22589 - DNA, 3543 bp, Homo Sapiens
tcggtggggaggcaagagggcggcgaggaggtgatgttaccacagtcccatttgtctgcaggcatcatctggctgcaaagaagagaacacactgtgtttgagggaggaggaaggaggatcagagtttaaactcctgccataatgcagggcactgtggcatttgaagatgtggctgtgaacttttcccaggaggagtggagtctccttagtgaggttcagagatgcctttaccatgacgtgatgctggagaactgggtacttatatcctccctgggttgttggtgtggatcagaagatgaggaggcaccttctaagaagagcatttctatacaaagagtgtctcaggtcagcactcctggggcaggtgtgtctcccaagaaggctcactcttgtgaaatgtgtggcgcgatcttgggagacattttgcacttggcagatcatcaggggacacatcacaagcagaaactgcacaggtgtgaggcatgggggaataaattgtatgatagttcaaaccgtccgcaccagaatcagtaccttggagagaaaccctatagaagcagtgttgaggaagcattgtttgtgaagaggtgtaagttccatgtgtcagaggagtcatctatcttcattcagagtggaaaggactttttgcccagctcaggattactgctgcaggaggccactcacactggggagaagtcaaacagcaaacctgagtgtgagtctccctttcagtggggagatactcattacagctgtggagaatgcatgaaacattctagcaccaaacacgtatttgttcaacagcagagacttccctctagagaggaatgttattgctgggaatgtgggaaatcctttagcaaatatgatagcgtcagtaatcatcagagagttcacactgggaaaagaccttatgaatgtggagaatgtgggaaatcttttagtcataagggcagccttgttcagcatcagcgagttcacactgggaaaagaccttatgaatgtggagaatgtgggaaatcttttagtcataagggcagccttgttcagcatcagcgagttcatactggagaaagaccttatgagtgtggagaatgtgggaaatcttttagtcaaaatggtactctcattaaacatcaacgagttcacactggagaaagaccttatgagtgtgaagaatgtgggaaatgttttactcagaagggcaatctcattcaacatcaacgaggtcacactagtgaaagaccttatgagtgtgaagaatgtggaaaatgttttagtcaaaagggcaccctaactgaacatcatcgagttcacactagagaacgaccttatgagtgtggagaatgtgggaaatcttttagtcgaaagggacaccttaggaaccatcagcgaggtcacactggagaaagaccttacgagtgtggagaatgtgggaaatcttttagtcgaaagggcaacctcattcagcatcagcgaagccacactggagaaaggccttatgagtgtagagagtgtaggaaattatttaggggcaagtcccacctcattgaacaccagagagttcacactggagaaaggccatatgaatgtaatgaatgtgggaaatcatttcaagacagctctgggtttcgtgttcatcagagagttcacactggagaaaaaccgtttgagtgtagtgaatgtgggaagtcatttcctcaaagctgttccctccttcgacatcggagagttcatactggagaaaggccttatgaatgtggagaatgtggaaagtcatttcatcagagctcttccctccttcgacatcagaaaactcacactgcagaaagaccttatgagtgcagagaatgtgggaaattcttctccagtctccttgaacacaggagagttcacactggagaaaggccttatgaatgcagggaatgtggaaaaacatttactcgaaggtctgcgcattttaaacatcagagacttcatactcgaggaaagccttacgagtgcagcgaatgtgggaaatcctttgctgaaaccttcagtcttactgaacacaggagagtacacactggagaaaggccttatgagtgcagtgaatgtggaaaatcatttcatcgaagctcttctctccttcgacatcagagagttcacacagaaagaagtccttacaagtgaaaagaaatttgggaaattctttagctaaacctctgtgcatcttcttgatcagagggttcttactggatcaggaccttatgagtgtgacaaacgtgggatattctttatgcagaagtcttgttttattacatacagaagagctcccactgcagaagggcctcttgagtgcgatgaatgtgagaaagccttctgccttctgtcattggataacagattgttctcataaggaaaacactgtacacgtacaggaaatattatttcttgtaaaacataacactggaggagatgccttatgacggagccatctgcctaaattgacataccttcagcatctgcataaactcaattatgttggagctgtgtggcatttttcaccctgccgggttcccttgccagacatgatgtcggttatctggcaaaagccattttatgtcggccacgaggcaggtgttcactgtgcatcattcattcaccccatgatgttctggaagtaaaccttggttgtctttcgttggccagaggaattgaatgtccgtctgtctgcccaggctggagtggcacgatctcagctcactgcagcctccacctccagggttcaagcgattctcctgcctcagcctcccggggatctcaagggcatttccctttgcccacctcaccttttcatatttggtaaactgtatgcatttgcctccagcccaagattataaatatgaactgattatgatctgcatgttctctctttgggttcaagcatttccttacagaagagccaccgtggaagtcatgggtaaatatgtgttgaattggtaactccctcttggagaatttcttgtgaattacacagcaataggggaactcatttaactggagacataatctcaatttgtaaagtgtggcccattttctaacatttttattttgcataccctcccctctcttctcgattgatgaaactaacaaagaggttaataaaagcccatctcgtcatgtacagggactcatgcctttaattccagtgttttgggagactaaggcaagaacatcctggaggccaggagttcgacactgtataacagatatatctgacagcagtaactcaagcacaccctaagaatgaccctgtggtctaagaagagtgttggttcagcgttccaaacgaagaaatccaggagtggccaacctggaggtttctgaacccctggcctgttccttggaatgaggccctttgttttgagctaggcggagggtgataagtgaaaatactatataaactgcatgcttctttcaaatgatagtggtttttttgtccagcctgccgctcctggactgccctgtatctaagtcctcaataaaccctatgtctcattt

SEQ ID NO: 22590 - DNA, 7056 bp, Homo Sapiens
caaagctagactgtaaccggaccagagactcttgtgacttctcctactgtagtgagccctctgaactggatgaaactgttgaagaatatgaagatgagaacaccctgtttgacatggtttgtgagtcttctgttacagatgaggatagtgactttgaaccccaaacccaaaggcctcaaagcattgctcgcaaaagacctggggtagtcccatcttccctccattcaagctcccagacgcagatggttgacgaatgcagcaatgatgtcatcatcaagaaaatcaaacaagaaatccccgaagattattacattgtggcaaatgcagaactgacaggaggagtagatggaccagccctgtccttgacacagatggcaaaacccaagcctcagactcacgctggtccctcctgtgtagggtctgctaaactgattccccatgtcacatctgccatcagcacggagctagacccacacggtatgtctgcatccccctctgtgatctccagaccaattgtccagaagactgctagggtatctctggcttcaccaaacagaggaccccctggtacacatggcaccaaccaacaggtggccatgcaaatgcctgtgagcacatcccatcctaacaaacagatcagtatccccttgtctgccctgcagctgcctggacaggatgagcaagttgcctctgaagagttcctgtcccatctgcccagccaggtctcctcctgtgaggtagccctttctccctcagttaacacagagccagaagtgagctccagtcagcagcagcccccagtcgctccagccataaccactgaggccacagcacagtgcataccagcttattccactaagctcaacaaatttcctgtatttaatattaatgatgacttgaatgatctgtgtaccagtgcagtaagcccaaatactaccaaagccacgcggtacgccttgaatgtgtggcgttattggtgcatgaccaacgggctcaaagaccacacagacatcaccaagatccctgcagtgaagttgaacgagctgctcgagaacttttatgtcaccgtcaagaagagcgacggctcggacttcctggccacctcgctccatgctattcgccgaggcctggaccgcatcctgaagaatgcaggtgtcggcttttccatcaccagcagcaccttcagctcctccaccaagaaactcaaggagaagctgtgggtgctgagtaaggcaggcatgtcgggcgcgcgttctcgcaacatcgtctacttctccctttctgacgaggaggagatgtggcaggcagggtgtctgggggatgacagccctatcactctcctgtccactgtggtcaagtacaacagccagtacctgaacatgcggacgctgcaggagcatgcggatctgatgtatggtgacatcgagctgctcaaagacccccaaaaccagccctactttgcccggacggacagcgtcaagcgggagagtcggagcggctccaccagagtgtgtcacgggaagatctaccatgagcattcccggggacacaaacagtgcccttactgcctcctctacaagtacatgtacatccaccggccgcccacccaaatggaggccaagtcccccttctacctgactgccaggaaggaggccacagacatgggcagcgtgtggtatgaggagcagaggatggggctgcgctctcttcggggaattgtcccaaacttagccaagaaggtcaagctggaaaactgtgagaacttcacctttgtctcgttcactcaggtctcccggaggcttggctcccacagctgctgccagtgagcccccactggggcccggccactgccctgtcacctgctcgggccagccagggttggagcagctggagctccttggaggcaggggctgaccaggtgtgacctcccggtctggcggctctcccctggtgtggcctgccctccctttgacttggggtttgctttttaaaatgaaactagatgagtctaaatcattcggatggtttatccaaatgtgcgtcaacttcgttagcttttagaatctaacacaatgtataattgttacatacaagagtgaggaaattcattttctctagtgcctttctagcacaggttttctcaaaacaaacaaacaaaaaaggaaactgttaagtagtcgtttaaaaaaaaaatcccagtagcgcagtagctttagaacgttaggaagactgtacactttgttgaattacactcacaattagaaactagagagaggcagacacgttccctatttccaggagacagattgcgcttgatgcgccttttttttctgttggtggataaggtggttctggagggcaggcagccttgtgtcggggagtatcctcaagcgacacttggtcatctgacaaggacttgggctgctcccacggctcccagcagcggtaggaaccccatctcggctgtcaatggagagaattttatgataaaagattcacgcaccagaagggtgtctgtgagaacaaggcttctagtgaactagacagtttgtaccatgagggaatttctagtagtgaaggaaaatggcttggaaaagccaatctgtgatcaaaatgtgaaaacctcctgaagcagaagtgcctatgttttatttctcagcaccatgtgagagctcctttgattggaacattttttgaggtttctgtctgttcttcgtgtcatcccattattcggtcagcatataccactggatctataaaacaactaaaggtaatttttagtcttagccaagaaaagctaaccaaacaagctgcaaaaaacacagatccccaaactttctttattaaagagatttggaatatttttgtcaatgtatgacttttcagccacaattacatgtcatcattttaggatggcaccaatacttgggacacgatgatttaggcaccccaccaggtaagcaaactcagcattaaggatgtagttataaaattagcgcataatggtaggtaatgcagtttgaaaccatttcactcaggtaaaatgcaacctgaccacattatttaaaaatcagcagaattttctaataactactctgagtgcaacaacaagtgaaaaaggagctcaaagagtgctcattaagagtaacaataatttctagggaccttgactttgcatttgaggaaaatcttgtgtaactttattccattatgctcctaatatgctttctaatcccaaattaaaactctaatacaaattcattttgtagaagtcttaaaatcagtcctctttctttttgaaaacattattttagtatttattttaattaattggtttcttaaaaaatcatacactagtcattgacatatgtaatacttcctttaccagagaagactcaaccaatgctgccttaagatttaatgttattccctttttagtcactgtgcatttataagtttgtttactagttgacctttcctgaatagagattagtttcggcatttctccatctgtatataaataacaggtaatatttaatcatcagtgtatgacttgatatcacataacgttctggtgtggtttcctgtagtgatcttagggttttgatttaaaagaaatacacaaaacattaggtacaatttcctttagtttgctaaacacccaaaggatattttgttttgttggttctgcacttaaactgaaatacaacctatgtgaactattgggcaaagcctgcagcctaattaattaaaacctccatttttatttgaatagattcaagtagaaattgccgttaggaatcactgggatcttttcggattttgaccttttcaaaggtagcaataactactccagaggttgtaatctttctgttggtagtggcttttcatcagctaaataatcatctctgcctcaaatgtgttgcctgtcacctagttgatgttccataaaatccctgggttctgaagtgaattattataattaataatcaggagggcgaatcttcagtggcatctgatggaatgaaagaactgtgtctgagcagcctaaaagctgtttgtgacatgccaccttgggaaacaagagtgaggaagaaaacacagtcatcaagtgccagcgtgtgccacccattgtactaggtactttattatgcatttatgtatatgtgtgtgtgtctgtgtatacacacaaacacatatacataagtgtttacacacacacacgcacaatatgtggttaagcctggtaagcctgctaaaatggcaaagcggcctggcgcgtggctcacgcctataatcccagcactttgggaggccaaggtgggcagatcacttgaggtcaggagttcaagatcaggaccaacatggtgaaaccccatctctactaaaaatacaaaaattagccgggcgtggtggcaggtgcctgtaatcccagctacttgagagtctgaagcaggagaattgcttgaacctgggaggcggaggttgcagtgagccgagaccatgccactgcactccagcctgggcaacaaagctagactccatctcaaaaaaaataaaaaataaaatggcgaagcacctgtccatgtgtttggccaaagccgtcctccgaggtcttaagggggccagagtagcagtcctcgttggcgttctaaggcagttgttctggcttccagtcagctctaaaccttaccttctggggactccaggattttctgctcttggcctaatgcaagagaaaggagaatccccagagaaagaagtggggaggtaaagagcgttttctccacttacctttgggttttttatgctcccaagtagaaataaatatcaagaattcacaggttgactgaagcacaagttgcccctgggctctgtgtcaaggctggtggtactgtaggtgttatgagaggacccatagggtgtccttcaggtgagctgttgtccacagcacctttcatatctgctgtaaagggagccctactttctgtctatcccccccaccgccggcccccggaatctaagcagactccctgttggaagcttactctggcacagaagctaggatgtcaccttaaagggtgtgattcaattgaatatagtttagtgcggtaccaggcacatcataagcatgcaataaatgttagccagcttagttataacttttggtaataattaatattatttaactaatttgcattataccacttatttcttccattatggagattctgtctcccttaaactgttaaacttgaagaagaaaccaaacatgataatctggtcaagttaacacattttcgcccatgaattctacctccaacacagccaagctctgatacctcagatataagcaaaaacaagtgaaggaagaacagaaaagccttatggggctttatgagaaggtttttccattgtttagtgtgtttgcaaaaaggaattttatggaagtacctaaccaaagctgtgacagaagggtctccttggtcatgtggcattttccagctttccttggattttatgctacattaatttgccctggctgataaatggtgtttgaagaaatgtgaaattttgttactttgatttttattttaattcaagcttattaaaagcatcaagcattatatgccacactcagcattttcatagacatagtcattaggagaatctggacaaagtaatactcttgtagaaacggaagcatcttgctgtacttgaaagataactggactcagagctacttcactcctcacttgggcaaatgccgatatcactttgcttagctataaagtgccatcagtgggatggatcgtcttcacggtgaaccgtgttacacttctgcaattcctcaagttcatattaattaggaagtggcagagctaggacacaaaattcctaattcctgaagatagttagtctcctaattaagtgcttctcactatattgggatgccttctttaggaataagactttcctttaattttcaagttccacaacttctaaaattattttgctatctcgaagcagcagaatattgatcatttttctcagtttaggctaacacagtccacaccattaccacttaaataaagtaaccgaatgctaaatattatccttatcaaacatccatcactttgttgcttttatgagatgtagattgctaaaaacttttgagctagtagacgttacctttaagcatcaatgaatgcaaacagtgaagacctcaaagaagagttacctcattttctctacatgatctccaatgtagtctcagataaggcccatacatagttaaaagctggtaacagctctgaacagaagtatgtattaaatgtttcaaacttgtatatatttttgaatgcttttgtttttggagtgaatttttaatactctgtgttaaaagaaaaacattccatcttgtaggcagtgttcctcagtaaaaatctttgttgcattttcccatataaatgaatcacccttattaaaacaggaggagggagggatttgtggtgacctaccgctgccctccctttctaagagaagaggaggccatggggtatgataactaaatgaacatctctggaagttcctccgtctgatatgtgtattctgacataacagaatttcccaagacttctttgaggaaggctgtccacgcttcaggcaaagtttacccattattattatgattttgaatattccttgttcattacagtccagaaaatctgcagaagttctccatgttcagtggttgaccagaatctgattgttgcgctcaattaaagtgcttattatttagctaaaacaacttatatggaagttaattatttcaggaaatacataataagaccaaaaaaatcactggataatatgtagatatattttagttccattactattaatagcaattagataactctccctccccccattgaggtgagaaatggctcctagatacttggtggtcaatagaactgatttgattaactttcatttaactgtggttattgttacatctactgattttttcaaataaaaatttctagaaggctc

SEQ ID NO: 22591 - DNA, 4180 bp, Homo Sapiens
aataacacagttattaatggactgcttggaaatatagttcacagcaacccaatggacatgcctggaagagagctcaatgaggacagagacagtggcatagcacggtctgcatctctcagcagcttgctgatcactccatttccttccccaaactcctcacttacccgaagttgtgccagcagctaccagcgacgttggcgacgcagccaaacaacaagtttggaaaatggggtatttcctagatggtctatagaagaaagctttaatctctcagatgaaagctgtggccctaacccaggaattgtgcggaaaaagaagattgcaattggggtaatcttttcattgtccaaagatgaagatgaaaataacaaatttaatgaattctttttttcacattttcctctctttgaaagccacatgaacaaattaaagagtgcaatagaacaggctatgaaaatgagccggagatcagctgatgccagtcagagaagtttggcatataatcgaatagttgatgccctaaatgaattcagaacaacaatttgtaatctttacacgatgccacgaattggagaacctgtctggcttacaatgatgtcggggactccagaaaagaaccacctttgctatcgtttcatgaaggagttcacctttctaatggaaaatgcttccaaaaatcaattcttgccagctctcattactgcagttctgaccaatcatcttgcctgggttccaacagtcatgccaaatggacaaccacctataaaaatatttttagaaaagcattcctctcagagtgtggacatgttggcaaagactcatccatataacccactttgggcacaactgggagacttgtatggcgctattggctctcccgtacggttagcaaggactgtggtagttggcaaacgacaagacatggtccagaggctactttattttcttacttattttataagatgctctgaacttcaagaaacgcatcttttagaaaatggagaagatgaagccatcgttatgccaggcacagtaattactaccactttagagaaaggtgaaatagaagaatcagagtatgtccttgtcacaatgcatagaaacaaaagcagtttgctctttaaagagtcagaagaaattagaactcccaattgtaactgtaaatattgcagtcatccactccttgggcaaaatgtagagaacatttcacaacaagagagagaagatattcaaaacagctctaaggagctgctaggaatttcagatgagtgccggatgatttctccttctgactgccaagaagaaaatgctgttgatgttaaacagtacagagataaattaagaacttgctttgacgccaagttagagacagttgtttgcacaggatctgttccagtagacaaatgtgcattgtcagagtcaggcttagagtcaacagaggaaacatggcagagtgagaagttgctggattcagacagtcacacaggcaaagcaatgagatccacaggaatggttgtggaaaaaaaacctccagataagattgtgcctgcttcattttcttgtgaggctgcccagacaaaggttactttcctgattggggattctatgtcacctgattcagatactgagcttcgaagtcaggcagtggtggatcagattaccagacatcacaccaaaccattgaaggaagaaagaggggctattgatcagcatcaagaaactaaacaaacaaccaaggaccaatctggagagtctgatacacagaacatggtttctgaagagccctgtgaacttccctgttggaatcattcagacccagaaagcatgagcttattcgacgaatattttaatgatgattcaatcgaaaccaggactattgatgatgttccatttaaaacaagtacagatagtaaagaccattgctgtatgttagagttttcaaaaatattgtgtacaaaaaataacaagcagaacaatgaattttgtaaatgtatagaaacagttccccaagattcatgtaaaacctgctttcctcagcaggaccaaagagatacactctccattcttgtcccccatggggataaagagagttcagataaaaaaattgctgtaggaactgaatgggacattccaagaaatgaaagttcagacagtgcccttggggatagtgaaagtgaagatacaggtcatgatatgactagacaagttagcagttattatggaggagagcaagaagattgggcagaagaggatgagataccttttcctgggtcaaagttaatcgaagtgagtgctgttcagcccaacattgccaacttcgggaggtccttgctgggtggctactgctcatcttatgtgcctgactttgttcttcaaggaattgggagtgatgagaggttccgtcagtgtctgatgtcagatttatctcatgctgtgcagcatccagttttggatgaaccaatagcagaagctgtctgtattatagctgacatggataaatggactgttcaagtggccagtagccagagacgagtgacagataataaattgggaaaggaagtattggtttccagtcttgtttccaatctgcttcattccacacttcagctttataagcataacttgtctccaaatttttgtgtaatgcatcttgaagaccggttgcaggagctatacttcaaaagtaaaatgctgtctgaatacctgagggggcagatgcgtgttcatgtcaaggagctgggagtggttctggggattgaatccagtgatcttccacttctggctgctgtagcaagcactcactctccatatgttgcacaaatactcctttaatatacctaaaaattgttagaaattggtgggaaaataggtagaaaccaaggaagcagacacaacatgcatttatggagattctttttcccttttagacttccatctgaatgagtcagtcaccagggtattctgcatagcattgtatattctgtgtatgtcagatggctttttctttttgactggacttttgggtggtggtagatttttaaacaaatgaaattaaagcaacaataattttgaagcatttgaaaaagccaaagtgtacggtagaaatttctacaaaatgaatattatcaagagtttcatgtgatcactgcagtgttgtcacagctcataaatagcaacagtgtttcatgatttaatggctcagaaatagttattcattagtttttaatttttaatttctaaggtacagagatctataaaaccttgattatttgttagttttgcaattcaaaacagctaatgtctggttatttctcaaagtaagtattttaaacagcctgttaattataagaaactcagaataatgagtgtaaatgtgttatgttatccacccaagtgtacatatgtacctatttttttttaaaaagcagaaatagaaatacaagactggtaaacatgcctttaaaaatatatatattttcaactagtattgtctataatgctgaaatattacttattggtgatttttctgtttcacacactctaaaatataagtaaagccaaccttttttttaaggctgagattcccaaaatgagaatactactttataccatttgtttataagtatgaactgttcttataaatattaatatttacatattcactaatttaacataaatgaaaattaggattaaaaattgcaccaaagcatcggcaaaaacaatactatattctttaaaagtgctcaggtagccaaggcccttgcttttggtatcaaccctcatgaacccataggagctgaatatttgtttcactgcttaataatcctcaatttacactattcataactcttaaaattattctctttttttctaagagcccctcccttccaaaagtgtatttttttcaaagattttcacttctcaattgttgcctttgtacatactatagagtgttgcttgtaagaaaggctaatatggaaccaaactcttgtaagtaatgtaaatagaaaggtgggtggataaagttttcaatactttctactacctcagtttacttgagtactacattatagtttattctttgcttatctggtctaagagacttttaatgctagtagtaaagttggtttctgctttcattgactattttcatcataatttcatcattgattaaaaaaag

SEQ ID NO: 22592 - DNA, 5926 bp, Homo Sapiens
cccgtccccgccgactccctccgatggcggcaccaagaggcccgggctgcgggcgctgaagaagatgggcctgacggaggacgaggacgtgcgcgccatgctgcggggctcccggctccgcaagatccgctcgcgcacgtggcacaaggagcggctgtaccggctgcaggaggacggcctgagcgtgtggttccagcggcgcatcccgcgtgcgccatcgcagcacatcttcttcgtgcagcacatcgaggcggtccgcgagggccaccagtccgagggcctgcggcgcttcgggggtgccttcgcgccagcgcgctgcctcaccatcgccttcaagggccgccgcaagaacctggacctggcggcgcccacggctgaggaagcgcagcgctgggtgcgcggtctgaccaagctccgcgcgcgcctggacgccatgagccagcgcgagcggctagaccactggatccactcctatctgcaccgggctgactccaaccaggacagcaagatgagcttcaaggagatcaagagcctgctgagaatggtcaacgtggacatgaacgacatgtacgcctacctcctcttcaaggagtgtgaccactccaacaacgaccgtctagagggggctgagatcgaggagttcctgcggcggctgctgaagcggccggagctggaggagatcttccatcagtactcgggcgaggaccgcgtgctgagtgcccctgagctgctggagttcctggaggaccagggcgaggagggcgccacactggcccgcgcccagcagctcattcagacctatgagctcaacgagacagccaagcagcatgagctgatgacactggatggcttcatgatgtacctgttgtcgccggagggggctgccttggacaacacccacacgtgtgtgttccaggacatgaaccagccccttgcccactacttcatctcttcctcccacaacacctatctgactgactcccagatcggggggcccagcagcaccgaggcctatgttagggcctttgcccagggatgccgctgcgtggagctggactgctgggaggggccaggaggggagcccgtcatctatcatggccataccctcacctccaagattctcttccgggacgtggtccaagccgtgcgcgaccatgccttcacgctgtccccttaccctgtcatcctatccctggagaaccactgcgggctggagcagcaggctgccatggcccgccacctctgcaccatcctgggggacatgctggtgacacaggcgctggactccccaaatcccgaggagctgccatccccagagcagctgaagggccgggtcctggtgaagggaaagaagctgcccgctgctcggagcgaggatggccgggctctgtcggatcgggaggaggaggaggaggatgacgaggaggaagaagaggaggtggaggctgcagcgcagaggcggctggccaagcagatctccccggagctgtcggccctggctgtgtactgccacgccacccgcctgcggaccctgcaccctgcccccaacgccccacaaccctgccaggtcagctccctcagcgagcgcaaagccaagaaactcattcgggaggcagggaacagctttgtcaggcacaatgcccgccagctgacccgcgtgtacccgctggggctgcggatgaactcagccaactacagtccccaggagatgtggaactcgggctgtcagctggtggccttgaacttccagacgccaggctacgagatggacctcaatgccgggcgcttcctagtcaatgggcagtgtggctacgtcctaaaacctgcctgcctgcggcaacctgactcgacctttgaccccgagtacccaggacctcccagaaccactctcagcatccaggtgctgactgcacagcagctgcccaagctgaatgccgagaagccacactccattgtggaccccctggtgcgcattgagatccatggggtgcccgcagactgtgcccggcaggagactgactacgtgctcaacaatggcttcaacccccgctgggggcagaccctgcagttccagctgcgggctccggagctggcactggtccggtttgtggtggaagattatgacgccacctcccccaatgactttgtgggccagtttacactgcctcttagcagcctaaagcaagggtaccgccacatacacctgctttccaaggacggggcctcactgtcaccagccacgctcttcatccaaatccgcatccagcgctcctgagggcccacctcactcgccttggggttctgcgagtgccagtccacatcccctgcagagccctctcctcctctggagtcaggtggtgggagtaccagccccccagcccacccacttggcccactcagcccattcaccaggcgctggtctcacctgggtgctgagggctgcctgggcccctcctgaagaacagaaaggtgttcatgtgacttcagtgagctccaaccctggggccctgagatggccccagctcctcttgtcctcagcccacccctcattgtgacttatgaggagcaagcctgttgctgccaggagacttggggagcaggacacttgtgggccctcagttcccctctgtcctcccgtgggccatcccagcctccttcccccagaggagcgcagtcactccacttggccccgaccccgagcttagcccctaagccctcctttaccccaggccttcctggactcctccctccagctccggaacctgagctccccttcccttctcaaagcaagaagggagcgctgaggcatgaagccctggggaaactggcagtaggttttggtttttattttttgagacagggtctcgctccgtcgcccaggctggagtgcaatgttgcaatcatggctcactgcagctttgaactcccaggctcaagcgatcctcccatctcagcctcctgagtagctgggactacaggcacaggccaccacacctggctaatgtttaaattttatgtagagatggcggggggggcgggggtctccctatgttgcccaggctggtctcgagctcctgacctcaagtgatcctcctgccccagcattccaaagtgctgggattacaggtgtgagccactgcctggcctggccgtaggtttgtaactgtttcatagaagagccctggagaagacagtagaatgagcctatctagtttaaaaaataaagaagcacgttgatttcaccaccgccactccctgagcacctctatgctgccacccccacaggcccatgaggagggacagggctggatgagtttcttgggcctctcccctcaacagggcatggacttggctaagacagccagggggtggcagcaggagatgccacagctctaaatagcccgatccctgctcctggcttaaagctgctgcgagtatcacaagactgtctgaggatgccaattcagcaggtcagcgcctccccacaacacacacacacacacacacacacacacactcacacatacacagaggggccttgaatgaggaggagacaggagtctgagggaccctcagactgccactctccaggcttggctgggctcaaggcccctgtctgctcagtagggcaaatcccaaggacacgggcttcccttcctccagccagccagccttttacacaaaggctggaaacgctgcttgggccgcctctatagaaatgccaggagagcgcactggacactaggcgacagaatctggagaaaatcctgcacccgcccctgccagcagggtgaaatgtggaggcctggtgttttaggttctgccagccaacagtgccggcactggacaagggcagaacttgacattagtccccagagggtggcctggaactgggctgggataggccttgaactggccccaagccccacagaaaccaaaacacagggctggggcagactccaccttctagcaactccaagaactaatgcagaaagtggcagtgtcccccgctccttcatgctgggagtggcgtttggctctggttaatttgtgtgtctgaaagaggataatcagaatcaaaagggcccagaaggaatgggccgagccaggcgggccgggccaggcagcccgggcatctggccctcagggctgtcagagggtcaggctgccaaactgcagcctcaggatgggaggcacagtgaggctaagtccagttttagcaaatgaagagccattagcattgcccagcccctgcagagccaggtctggccaggggctggctggggggtctgggtcaggtgagcaccagacccagggctgagtgcccatcctgcttggcttctctggtttcgtatctggtaccaagaggaaggggtgaaggctaggatgagggcccaatactgagaaggctgccttgaaagggcaagagtctttttttttttttcttttgagacaaagtcttgctcgtcccccaggatggagtgcgatggcgtgatctcggctcactgcaacctctgcctcccgggttcaagcgattctcttgcctcagcctccggagtagctgggattacaggcgcccgccaccatacccagctaatttttgtatttttagtagagacggggtttcaccatgttggccaggctggtctcgaactcctgacctcaggtgatccacccgccttgacctcccaaagtgctgggattacaggcgtgagccactgcacccagccaaaagggcaagagtctttaaggaagtgaactgggaagcagaagcaagggagaaatcacagggtttttttttttgtttgtttttttgagatggagtctcgctctgtcgcctaggctagagtgcagtggcacgaccttggctcactgcaagctccgcctcccgggttcacaccattctcctgcctcagcttcccaagtagctgggactacaggcgcccaccaccatgcccggctaatttttttgtgtttttagtagagacagggtttcatagtgttagccaggatggtctcgatctcctgacctcgtgatccacccgcctcgccctcccaaagtgctgggattacaggcgtgagccaccatgcccagcctgaaatcacagctttttatcccggaggcccatgggtagaaacaacacatagggctatgttctctcagcccaaagctaagggcaggaaaaaaggcatgggccataggagcctgagtgacttggtttgggacaggagggttggggggctttagaggggtcaggcaggtcctgtgtcctctcagtttccctggaaaggggcttggaggcaccagtcatggacctgaaaggatcagggggtcagggaatgggtaagttccagaggatgagaagagggggaatgggaagtcttaaacacagctactggggcccagcaacttgccatgttaaaatgcacccctagtgactcaaagaaccacccggccagtggtgcaggaggagagatgtggcacctgggcacagtgggaaggcacggggcctgcacctccaccagaggagccactgctgacctggaccaagggggctgctctgtgcccagctagggaagcctgggccggctcctgtgctgaggtgctcaggtgctggctgagagcccagttgctgctctaacttggagtgaacctgggtcaatagcagctcgtctctggcgggtgggaagggtctgacaacatcaagtttgccctggaagaagggcagccttaaaggaaggcctttggaagctggcctggtgctgtgggcttgagggactttgtgtccaagccctgtcgtcctggctccagcctaggctccagcactccatttcttccactgccacctgctgaccaggaataccaggacagaaggttttgttcagctgctttctttattagaaacaagtgagatgtattgagcag

SEQ ID NO: 22593 - DNA, 5142 bp, Homo Sapiens
gaagaatatgaacaggatgagagagaccagaaagaggagggaaatgattatgacactcgaagtgaggccagtgactctggttctgaatctgtttccttcacagatgggtctgtcagatctggttcaggcacagatggatcagatgagaaaaagaaggaaaggaagagagctagaggcatatctccaattgtttttgatagaagtggaagctctgcatcagagtcatatgcaggttcagaaaagaagcatgagaaattatcatcttccgttcgtgctgtccgaaaagatcaaaccagtaaactcaaatatgtgcttcaagatgcaagatttttcctcataaagagtaacaaccatgagaatgtgtctcttgccaaagcgaagggtgtatggtccacgctccctgtaaatgagaagaaattaaatcttgcatttagatctgcaaggagtgttatcttaatattttctgtcagagagagtggaaaatttcaagggtttgcaagactttcttcagaatcacatcacggaggatctcctatacactgggtgcttccagcaggaatgagtgctaaaatgctgggaggtgtctttaaaattgactggatttgcaggcgtgaattacccttcactaagtcggctcatctcaccaatccttggaatgaacataaaccagtaaagatcggacgtgatggacaggaaattgaacttgaatgtggaacccagctttgtcttctgtttccccccgatgaaagtattgacttgtatcaggtcattcataaaatgcgtcacaagagaagaatgcattctcagccccgatcacgaggacgtccatcccgtcgagaaccagtccgggatgtgggaaggcgtcgaccagaagattatgatattcataacagcagaaagaaaccaaggattgactatccccctgagtttcaccagagaccagggtatttaaaggatccacgataccaggaagtggacagacgattttcaggagttcgccgagatgtgtttttaaatgggtcctacaatgattatgtgagggaatttcataacatgggaccaccaccaccttggcaaggaatgcccccttacccaggaatggaacaacctccacaccatccttactatcagcaccatgctccacctcctcaagctcatcccccttactcaggacatcatccagtaccacatgaagcaagatacagagataaacgagtacatgattatgatatgagggtggatgatttccttcgtcgcacacaagctgttgtcagtggccggagaagtagaccccgtgaaagagaccgggaacgagagcgagaccgccctagagataacagacgagacagagagcgagatagaggacgtgatagagaaagagaaagagagcgattatgtgatcgagacagagaccgaggggagagaggtcgatatagaagataatgggcttttggaagcactgattgtttaaagatacaaaaaatcttgtattttttttttgtgtgtgtttacaagtagtaaatttattttcagctgtctgcctatgaagttcattgtgtagaaggatttattatgaccccctttgttccaagcatgcagtatcataagaactggaaaaactcaaatccgccaaaaatccacagctgacagttgaattgacacttttattggggcagaatggaacagtccaagaatgtagatactgattctttctccataaatgttcttatagtgtgttcatcctagagttatttttttgtttgtttttttcctttttggatcttgattgataactgccatgatattttgctttgatgtgtttctacatgtagttgcacacggttcagtaaaaataatgctgctatcgagtatgcaaatattgaagtatgatggtttgactgtatggcagtgttgtagcagcctcttgtttttttccccattgcctctttttttaaaaaacttataaagtcactttttatttttcctcagtcttcaatgacgagagcaatattaagaagacattgctatctaatttttaatctttttaaatgaaaaattcctatgttcagtagcgtggttgatgctattgtttagccttcccctccaaattgtatacattggcttggaatgttcacaacttgcgtgcgtggcagcggaagacgattcccatattctacattgctactgttttgtataaaataaattggtaaagattgacggttatcttttgtatctttttcttatccaattgcaggtttgttttattatgcaataatggacataaaagcatgctttttgttcaggaattttaggaaccccatttgctttttttgaggcacgctttagcagaaatgattgacctaggcctgttgcattaaaagcttacttctatttctaacataagatacacagagttatgttaataatttggttaagtatttatacacctgataacattttgagtctactctgatcacagaatcgtttatttaggttttctatttgttgttttagtcttctgtaagtgaacgactttgtacatgctttctactttacttcataaatggacttttaaccctcttgtattagttctgtattttaagttaactgtccagttctcccagtggtaaccaactataacatagaaatagagccgctcaagaaaacagtttatgaaataatttttttgaattttttcttgagttacacctggagttttggcctttggaatttggcctttataaacattaggaatatttgaatgtttgatttttttatagtatcaacagttgtactgtgtaccagatcacatagtacagttttacatttaatctatattggcctgaaaagaacaacacaggcactttactcttaaaggatataataaactatagttatactgcattcatattcataccagcatgtagtatctttccctgcattcacagaagttttatttacaatgacaaaactaaagcctgaggatttgttttaaatctgcattgtggtagagaggaaaaagtacttttaaggaaacctgggttctagttttgtcattgtctttaattaaaccggttagtgatacatggtaagtcacttcattggcattttgtgtattcatcagtaagctagacaagatgatagctacagtttaagaatttctgtaaccattatacaaaactggtaggtaatattaaaggtattttcctgaaataataggaataaatactgagcactttgtatgcaatagagactttgtgcttttatatacagactcatttaaatgggctcagagaggctagtaaacttgcccaagattagaaaggtagtaattgatgggccaagattttacccatgtttttatttggtgtttctaaaccacctcatcacttttgaaaaaacagtatataaattaataaatgttttggagatggagtctgtcgcccaggtggagggcagtggcatgatcttggctcactgcaacctcctgcctcagcctcccgaatggctgggactacaggcacccaccaccacaccccgctaatttttgtaattttagtagagatggggttccaacatgttggccaggctggtctcaaactcgacctcaagtgacctcacctgcctcagcctcctaaagtgttgggattacaggcgtgagccactgcacctggcctgagatttttaaacattaacatttccttcaggcttaagcagaggatttttctaaagtgccatccaattagatgttaagttatgctttgtatgttgagcttagtattgagtcgatctattttaaaaagccaacattaagtttttaccaagtatctggcactattctaaacaattctcttggctcacataatcatcactgttttctcctttcctaatttttaaaataaacttaccggaacattgtataaaaaatgcaagatttttttctgtacagaagagtcagtatataaaaatcagtatgttttatttaatattcgtacacatgacagcttttgtcactgtgagaagacatggtttctttcgtgtactccactgtgctgtgattctaacaatctacattagtatgatgtgttcagatgaaaaacagaaaattcagtcattccgagtttagaaatccggtcagggattttattggctggagtaatagttcaaaggagtgaaaattcaagcatgtaatttttggatttgatttcctccataatgatttcctccataatggctttttttcaagcatggtctaatttttcagaaaatggccattatctccaagcttccattgtccatgtagtttcagtggcaggagagagactattttcctcccagtgtccatgtcagttccccaaaaggactgaatagccatgttggttttggagccagccgtaatccaatctgtatttccaaggaaatggggttctttgtctcccagcattgggaagcaagagaggcgcatgttatggtcacctctgtgaggattacatcaggaaggacagtctccaaaagacatggacagaggaaatttagcagatgtccattaaatcaggatctcatacaagttataacacctgaatgtttgacttttcagagtattttgccatcacaggtgtggcatcttgcccttggatatatctacattctgctgtagaatgtcgtggtctttctgagggtcacatacatcctgtcttgtcataatgttaaccattaagagtcctcaggggcatggaattgaagaaggaactgttgccagcagttaactgaccaagctagagttccctgacccaacgtaagggtgactgtgacacacatggataattttagcttcatgtttaagattttgttatttgggtaggaaacattccaaatgcagtttgaaacacatattaaaattgaggcacacaggaaagaactggctcaagtttagtccccaagttccttatagtaggaataggaatccttagagtataagcaatccatgcatagtattctgttatctatcatgtagatcatttaatctctaattttttggggtggggattctcttgtttctaaatcttacactttcagtttcttctgtgtcttaaatatagattattgactgttgtcttaaatactaataaatacattaaatgt

SEQ ID NO: 22594 - DNA, 3146 bp, Homo Sapiens
cgctgctctgtgtcctctgctcctagaggcccaacatctgtggccctgtgacctgcaggtattgggagacccacagctaagacaccgggaccccctgaaagcctagaaatggacgacttgaaatatggagtgtatcctctcaaggaagcaagtggatgccctggggctgagaggaatcttctagtttactcttattttgaaaaggagacattgacatttagggatgtggccatagaattctctctggaggagtgggaatgcctgaaccctgctcagcagaatttatatatgaatgtgatgttagaaaactacaaaaacctggtcttcttgggtgttgctgtctctaagcaagacccagtcacctgtctggagcaagaaaaagagccctggaatatgaagagacatgagatggtggatgaacccccagctatgtgttcttattttaccaaagacctttggccagagcaagacataaaagattcttttcaacaagtaatactgagaagatatggcaaatgtgaacatgagaatttacagttaagaaaaggctccgcaagtgtagatgagtataaggtgcacaaagaaggttataatgagctaaaccagtgtttgacaactacccagagcaaaatatttccatgtgataaatatgtgaaagtctttcataaatttttaaatgcaaatagacataagacaagacatactggaaagaaacctttcaaatgtaaaaaatgtggcaaatcattttgcatgcttttacacctaagtcaacataaaagaattcatattagagagaattcttaccaatgtgaagaatgtggcaaagcttttaaatggttctcaacccttactagacacaagagaattcatactggagagaaacccttcaaatgtgaagaatgtggcaaagcttttaagcagtcctcaacccttactacacataagataattcatactggggagaaaccatatagatgtgaagaatgtggcaaagccttcaaccggtcctcacaccttactacacataagataattcatactggagagaagccctacaaatgtgaagaatgtggcaaagcttttaaccagtcttcaacccttagtacacataagttcattcatgctggagagaaaccctacaaatgtgaggaatgtgacaaagcttttaatcgattctcataccttactaaacataagataattcatactggagaaaaatcttacaaatgtgaagaatgtggcaaaggctttaattggtcctcaacccttactaaacataaaagaattcatactggagagaaaccctacaaatgtgaagtgtgtggcaaagcctttaatgagtcctcaaaccttactacacataagatgattcatactggagagaaaccctacaaatgtgaagaatgtggcaaagcttttaaccggtccccacaacttactgcacataagataattcatactggagagaaaccttacaaatgtgaagaatgtggcaaagcttttagccagtcatcaatccttactacacataagagaattcacactggagagaaaccctacaaatgtgaagaatgtggcaaagcttttaaccgatcctcaaatcttactaaacataagataattcatacaggagagaaatcttacaaatgtgaagaatgtggtaaagcctttaaccaatcctcaactcttactaaacataggaaaattcatactagacagaaaccctacaactgtgaagaatgtgacaatacatttaaccagtcctcaaaccttattaaacaaaataattcatactggagagaaactctacaaatgtcaagaatgtgggaaagcctttaagcagtcctcaactcttactaagcattaaatattggccgggtgcggtggcttatgcaaaatggctcccagcattttgggaggctgaggtgggtggatcacaaggtcaagagatcgagaccatcctggccaacatggtgaaaccctgtctctactaaaaatacaaaaattatctgggtgtggtggcacgtgcctgtattcccatctactcgggaggcttaggcaggataatcacttgaacctgggaggtggaagttgcagtgagccaagattgtaccactgcactccagtttggcaacagagtgagactccgtctcaaaaaaaatttatactgtacaaaaaccccacaagtgtgaaaaacatggcaaagcctttaagaagccctcaattcttaacagacataagataatttatactggagagaaactctacaaatcagaaagatgtgactacttttgacaacgcctcaaacttttctaaccataaaagtaattatactggtgagaaatcctagaaatctgaagagtgagataaagcctttaaatggttgtcacacttcattgtaggtaagataattcatactggagaaaacgcctacatgtgtgaacaatatggcaaaacttaatgctcacactttattgctaggaaagcatttatacttgagataaattatacaaatataaagactgtgaaaaagccatcattatctgctcacattttactcaacaccagagagttcctgcttaataaaagcattataagtgcaattactgtcaaaagatctttcagaaaatataagcttttttagtgaagagtatttattttgaagttgaacatcacaaatataaaaagggttgtagtgcctttacttgtatcacagatctttttgtagacattttcttctagaggaaaactctgaagcagttgatcaaactttgttcaacatcagggaatttatattgaaaaattgtgcaaatataataaatttggaaaaacaatttttcaaaaactacagcttagaaatcaacagttatactagaatatattttttccagatgcagtaaaagtaaaatatttaatccataattaagtctatgcaaatatcagagaatttatggtagaaatatataaggtactgacacttcagatatactaaatcagagtgctaagtatagaaaatctgaaactaaagttggtagaaaagttatttgtatagaactttaagaggatcagaaggttttttgcagagttataattacattcaaagtatactttatttcttgaaaaatattacagattttttgaaaatt

SEQ ID NO: 22595 - DNA, 3473 bp, Homo Sapiens
ggcagcgccgtggcctcgcgtccatctttgccgttctctcggacctgtcacaaaggagtcgcgccgccgccgccgccccctccctccgaactgccattggatgtccagaatcccctgtagttgataatgttgggaataagctctgcaactttctttggcattcagttgttaaaaacaaataggatgcaaattcctcaactccaggttatgaaaacagtacttggaaaactgaaaactacctaaatgatcgtctttggttgggccgtgttcttagcgagcagaagccttggccagggtctgttgttgactctcgaagagcacatagcccacttcctagggactggaggtgccgctactaccatgggtaattcctgtatctgccgagatgacagtggaacagatgacagtgttgacacccaacagcaacaggccgagaacagtgcagtacccactgctgacacaaggagccaaccacgggaccctgttcggccaccaaggaggggccgaggacctcatgagccaaggagaaagaaacaaaatgtggatgggctagtgttggacacactggcagtaatacggactcttgtagataatgatcaggaacctccctattcaatgataacattacacgaaatggcagaaacagatgaaggatggttggatgttgtccagtctttaattagagttattccactggaagatccactgggaccagctgttataacattgttactagatgaatgtccattgcccactaaagatgcactccagaaattgactgaaattctcaatttaaatggagaagtagcttgccaggactcaagccatcctgccaaacacaggaacacatctgcagtcctaggctgcttggccgagaaactagcaggtcctgcaagtataggtttacttagcccaggaatactggaatacttgctacagtgtctgaagttacagtcccaccccacagtcatgctttttgcacttatcgcactggaaaagtttgcacagacaagtgaaaataaattgactatttctgaatccagtattagtgaccggcttgtcacattggagtcctgggctaatgatcctgattatctgaaacgtcaagttggtttctgtgcccagtggagcttagacaatctctttttaaaagaaggtagacagctgacctatgagaaagtgaacttgagtagcattagggccatgctgaatagcaatgatgtcagcgagtacctgaagatctcacctcatggcttagaggctcgctgtgatgcctcctcttttgaaagtgtgcgttgcaccttttgtgtggatgccggggtatggtactatgaagtaacagtggtcacttctggcgtcatgcagattggctgggccactcgagacagcaaattcctcaatcatgaaggctacggcattggggatgatgaatactcctgtgcgtatgatggctgccggcagctgatttggtacaatgccagaagtaagcctcacatacacccatgctggaaagaaggagatacagtaggatttctgttagacttgaatgaaaagcaaatgatcttctttttaaatggcaaccagctgcctcctgaaaagcaagtcttttcatctactgtatctggattttttgctgcagctagtttcatgtcatatcaacaatgtgagttcaattttggagcaaaaccattcaaatacccaccatctatgaaatttagcacttttaatgactacgccttcctaacagctgaagaaaaaatcattttgccaaggcacaggcgtcttgctctgttgaagcaagtcagtatccgagaaaactgctgttccctttgttgtgatgaggtagcagacacacaattgaagccatgtggacacagtgacctgtgcatggattgtgccttgcagctggagacctgcccattgtgtcgtaaagaaatagtatctagaatcagacagatttctcatatttcatgacacatgtgaagaggcatcgtggacttttttctactcaattccagccaatgttgaaaagaaaaagaaaaaaaaaaactctctaatcagttgtacacacattgaaacttatagccatggccagattttatgctaaaaatggtagtttgtcaaagacaaaattctcttagaatctaatccaacttgccagccctgagaaaatcccttttaaggccaaggaaagctgaatgctagcagccaggcctgtggtacttccatgagaaaccatagcagacaatgccctcccaagtactgaaatcacactggaatcccccttgttgggttcatttgattgtttaacacaggatgtgttgtgtcattctgaagtttttatttggggcagaagtctttatggagatgtaaatgacagcgtttctgggttatgcataacttctcactggtcagagacaccggtgtgtcaagcatggatattgcattgcaagacttgaatctataaaaattagaatcacacagtcagtactacaagcaaaacagagaacctgaaagaaggtgcacagactgtaagaaaaaacccaagtttgtgatatttcagtgattccaaagaacattctaggttttttgtttgtttttttgttttttgggttttttttttttactgcagaaaattggtggtattttcacattcatagtgtttctatccaatttcagtacccacatttaatgaggaaaaaatgttttaccaatgaaggaggaattcttaaattagctgtaatgttaggttggagaaaatttggtatttagggtattttcaaggtaccatcaaatcagatttctgtttttttgttaaaaaaaatttttttaatcagtattgtttttacaagtaatatactttgaaactcttgaactaatagtctcaaaaactctagaggacagtctgagaacacgtatttctattgttctaaataaatacatgtttttgaatagttcaatcatgaattattgactatgtcttcatcaaaagtgttaatccctctcagggtctctggtgaagaccttcaagagtttggttttttctcccaggaaattggaaggtagaattgtaaattcatagaacttcttttataatggtgtacctcagcagctgcctttcaatttatgccaagtccttacagagtttatacttgaatagtaaatatgtcttctgagttttacagtgtcttaaactcaatgcacattttttttcttctttttccaccccttcttgtttgtagttcattatacctgtcctattacagaactgatttccttcctggctgtacatgttggggtgctggatttttttccgtgtctttagtcttccataaatccacacacacacacacacacaaaaaatatatatatatataaatatatatgtaggatacatgttctcttctttagcttgtggtgaatacagtaatttgcattgaagaataaaacatctgttgccttttttgactaag

SEQ ID NO: 22596 - DNA, 3473 bp, Homo Sapiens; identical to SEQ ID NO: 22595

SEQ ID NO: 22597 - DNA, 4559 bp, Homo Sapiens
ggaagagaaatcccaaagcttttgcaattcagtctgctgtggggatggcttgatcctttcacaggactcaggatttgaagacaaaaaagcatcatattccagtggttgatcagactccactagagccgccaccaatagtgatagtggtgacggggcctccaaaagttggaaagagcactttgatataatgcctcattgggaacttcacccagcagaagttgaccgagatcagaggccctgtgatgatcgtgtcaggtaaaaagctccgactcaccattattgaatgtgggtgtgacattaacatgatgattgatctggctgaagtagcagatctggttgccaagctgttctacctttctggaatggtgcatggagaatatcaagaccaagaaatccacaatctgggccattttattacagttatgaagtttaggcctctcacatggcagacgtctcatccttatatcctggcagacaggtaaaaagtgattgtaagcttttatttcctagaccatatatttcaaagctaaaaaggctagaaaaagaacagtgataggatttattttgtgcctatttgaatagtgggggtagaagtgtagttgatggaaaatgtctacttatatcattgctcaaagatgctgtgcctttgggagtaaattaattatgagatgtttaggaaaatgggaggacttggaagcatttaaagctacaggatatggccccatcctatgttcagcctcagttttcagtgatgctgccttcgtgcccgggtgcttgagtcctttatgtgtgccttcagtttccttcctttgtgctcttctttgtgctgtggttttctcagcctggaataccctttttccacctgccagaatccaagccacagtacaaatcccagagcacaggctcaccctcttccagaaagggattttctgaatatgttcttcactcttccctgaccccaggtggacgtcatctccctgtctggtgtcttacggaatgaatgtcactttcagcctagagacacagttgtgtgcctgccccttttcctctggtgggtggtgaatggtgcttccttatttctgtattttctagttttctaaacgacatgcttagtggacaagagtgtgatgagtcattgacacatgaaaggacgtataggaactttggcattcatttctgctgtatgattgagtttatttttctaggatggaagatttgaaaaacccagaggatatctgaacaaaatgtgactggcaggtgtcactttatggttatttaagaggagcacacttgaaaaataaaagccaaattcacatgccaggtattctcttgttgtagaacatactagaatcacacataggattcttgggatggcttcttttctcaggaaaactgaaaaatgaccaaacaagggaagatggctttggtggaggttttaaaagtaagccagctatgtgtaggcctgtaaaggtgttattgaatcccctcttctctgaccttttgtcttatagctagaggagcactgttccagtgtggcacaatactcttctttatggtcatgggttaagcccttggactgtgcatcgttttttttttgttttgttattggtgactgaccccatgagtcatgctctttacaaagcatgcatttggatgtttctttcttttttttattattatactttaagttctagggtacatgtgcacaatgtgcaggtttgttacatatgtatacatgtgccgtgttggtgtgctgcacctgtcaactcgagatttacattaaatatatctcccagtgctatccctccccactcccccaccccacgacaggcgctggtgtgtgatgttccccaaaaataaataaattaattaattaaataatagaaattctcggctgctttttatagctgtagaaaaaaaaatgaaatcttattttaaacttttcttttttttttttttttttgagacagagtctcactttgtctcccggcctggagtgcagtggcgcgaactcggctcactgcaagctccgcctcctgggttcaccccattctcctgtttcagcctcccgagtaactgggactacaggggcctgctaccacgcccggctaattttttgtatttttagtagagatggggtttcaccatgttaaccaggatggtctcgatctcctgacctcgtgatccgcccgcctccacctcccaaagtgctaggattacaggtgtgagccaccacgcccggcgaagctgacttttcccattatttttaacggtaattcataaaatccttgttaggtttgatgacaggtaccatattaagggcagcattttataacccatatcttaaacatcatctctggaagttgagagcctccaatgggttttctatagagtgcacatgataccacactcaggcagttcatggagtgtaagacatatcttagtgctttgtcatttgacattttaactgagaaaaaaatatactttgataagtttgacttacacttcccttccccttcaggtatctactgagcgtttcagtcaacaatacagctcgtgttcgacaatattccttgatggcagcacagccagccagcattatcttataatgacaataatatctgtgaccttggagatacatcatcatatcacggaaagagatgcagatagatctttgaccatacttgatgaacagttatactcatttgcgttttccaccgtgcacattacgaagaaaagaaatggaggtgggagtttaaataactattcctcctccattccattgactcccagcaccagccaggaggacctttatttcagtgttcctcccactgccaacacacccacgcccatttgcaagcagtccatgggctggtccaacctgtttacatctgagaaagggagtgacccagacaaagggaggaaagccctggagagtcacgctgacaccatcgggagcggcagagccatccccattaaacagggcatgctcttaaagcgaagtgggaaatggctgaagacatggaaaaagaaatatgtcaccctgtgttccaatggcgtgctcacctattattcaagcttaggtgattatatgaagaatattcataaaaaagagattgaccttcggacatctaccatcaaagtcccaggaaagtggccatccctagccacatcggcctgcgcacccatctccagctctaaaagcaatggcctatccaaggacatggaagctctgcatatgtcagccaattcagacatcgggctgggtgactccatatgcttcagccccagtatctccagcaccaccagccccaagctcaacctgcccccctcccctcatgccaataaaaagaaacacctaaagaagaaaagcaccaacaacttaaaagatgatggcctgtccagcactgctgaggaagaagaagaaaagtttatgattgtgtccgtcactggccaaacgtgccactttaaagccacgacgtatgaggagcgggatgcctgggtccaagccatccagagccagatcctggccagcctgcagtcatgcgagagcagtaaaagcaagtcccagctgaccagccagagtgaggccatggccctgcagtcgatccaaaacatgcgtgggaactcccactgcgtggactgtgagacccagaatcctaagtgggccagtttgaacttgggagtcctcatgtgtattgaatgttcaggaatccaccgcagtcttggcacccgcctttcccgtgtgcgatctctggagctggatgactggccagttgagctcaggaaggttatgtcatctattggcaatgacctagccaacagcatctgggaagggagcagccaggggcagacgaaaccctcaatagagtcaacgagggaagagaaggaacggtggatccgttccaaatatgagcataagctctttctggccccactaccctgcactgagctgtccctgggccagcacctgctgcgggccaccgctgatgaggacctgcggacagccatcctgctgctggcacatggctcccgtgaggaggtgaacgagacctgtggggagggagacggctgcacggcgctccatctggcctgccgcaaggggaatgtggtcctggcgcagctcctgatctggtacggggtggacgtcatggcccgagatgcccacgggaacacagcgctgacctacgcccggcaggcctccagccaggagtgcatcaacgtgcttctgcagtacggctgccccgacgagtgcgtgtagtatctgttttatttgactgcagtctccttggtgtaaaaacaaaatgggaaaaataaggataactcagaatttcaaaaggaaatcacaaattcagctaataatagcattttcagtacttttcgtaaactaagtaaatacacaaaatgttgatttttctgaccataagacatattttatgtccttttgccgaggtgggtgtgttagtctcaggccctcctggccacattgcccaagtcacacaggcttctgtattatgtatttagataagatgtgtgaaaatatatttgaaaaaaagttc

SEQ ID NO: 22598 - DNA, 3098 bp, Homo Sapiens
gcgagactctgtctcaaaaaaacaacaaaaaagtgaatcccgtaaaagggacagatcctggggttcagtcaccagttgttatcccctctgcaggcaagaactggggaagggaaagaaggcctgtgggcgttaaccatgtaggatcccaggtaaccatgcaagtgggtattattttaaatgtgactcccttgtcccaaccccagagtcgcagctaggaagcccacagttttttcccatgggaaaatgcattgccagaattttaacagcaatcagtgagaaagatgggattctttggtcacagatttttcaagaatgtttctttaaggtgaggtgacaaaggatgaatcagtggcggtgggacttgtccacggtggagtcccttctttcctcactgctcctctccacccagcagtgggctagtagatgccaggcctgtggtggtcagggtttttcaactgtggctgtgttgacaatccaggctggatcattctttgctgtgggggctgtcctggacactgtgggatgtttagcggcagccttggcctccagcagcccttccctgcccagttgtgagaaccaaaaatgccttcacacattgccacatattccctggttgagtgccatctgcctatctggtggtgtgaaagagcatagctggccttgggctaggaggatgcgaaatcagagcaaggagacgaaggctcagggcctcacaaggcagtgtacgagcaactgtcagcatttttctgcctgcctgcctccaatccccacaacgtccagggtggcagataacttctgcttcctgtcaactcatcccgcctggcctagcctcgccaccagctttggtgaaccccacatgcgaggcggctggccatgtctagcatatcttgcgtttgtttaggagagagttagatttgaataagaagaatggtggtggctggaccccgctgatgtatgcctcctacattggccacgacacaatcgtgcacctgctgcttgaggcgggggtgagtgtgaatgtgccgaccccagaagggcagactccactgatgctggcctccagctgtggcaacgagagcatcgcctactttcttctccagcaaggtgcagagctagaaatgaaagacatccagggctggacagccctcttccactgtaccagcgccgggcaccagcacatggtcaggttcctcttggacagtggagccaatgccaacgtgagggagccgatatgtggatttactcccttgatggaagcagctgctgctggccatgagataatcgtgcagtattttctgaatcacggagtcaaggtggacgcgagagaccacagtggagccacagcccggatgctggccaagcagtacggacacatgaagatcgtggccttgatggacacttactcgccctctctgcccaagagcctctatcggagcccagaaaagtacgaagatctgagctcttctgacgagtcctgccctgctcctcagagacagaggccttgccggaagaagggtgtcagcatccacgagggaccgcgagccctggccaggatcacaggcattggcctgggcggcagagccccacggcctcgctatgagcaggctcctccccgtggctatgtcaccttcaacagcagtggcgagaaccccctggaagaagagggcctctgctgccgggatgtcacctcccccatcaatgagcgggatgtggagagcagcagcagcagcagcagtcgggaggaacatgctttctgtgccaacctggggcccgtccagagcagcagcagcagcgagggcctggccagagcccaggggctcagcagcgaagcttctgtggagagcaacgaggactcggatcatgcctgtaaaagctcagctcgcaaacaagctaaaagttacatgaagaccaagaatcctgacagccagtggcctccccgcgctgcaactgacagggaaggctttctcgctgagtccagcccccagactcagagggccccctactcaggaccccaggaccttgccgcactgctggagcagatcgggtgtctgaagtacctgcaggtgtttgaggagcaggacgtggacctccgcatctttctgaccctcactgagagcgacctgaaggaaattggcatcacgctgtttgggcccaagaggaagatgacgtccgccattgcccgctggcacagcagtgcccgcccacccggggatgccctggagctggcctacgccgaccggctggaggctgagatgcaggagctcgccatccagctgcacaagcgctgcgaggaggtagaggccacgcggggccaggtgtgtcaggagcaggagctgcgcgccgtggtggagagctgcctgctggagcaggaccgcgcccgcgaggacctccaggcccggctgcgggagacgtgggccctggcccgggatgctgccctcgtcctggaccagctgcgagcctgtcaagctgagctgtcatctcgagtgaggcaggaccagccccctggtgcagccactctgggcctagccgtccccccagctgactccaagggctggcaagcgtccctgcaggccatgagcctccccgagctctcgggagccctggaggaccgtgtccgtgagatggggcaagcactgtgcttagtgacccagagcctggagaagctgcaggtgctgaacgggaagaagtggcgggagacctagcctgcgggccgaatctgacgttgggtgattggtccaccctgaagctgtgtgccagggagtgaggaggacagtgagcaggtagctgccatgtgcagcccaggcccagtgggggccagaggatcaggccccgggagcagccggcagacagaggcaagacgggggctgcggccctggctcggcagctcgggccagcactgaggcgggacgagggcctcacccagaacctcgtggtgaggcccagagttcatgggctgccctggcccataccaggcagggccctggggggaaagtgtatccatatacacgcacaggtgccaactgaggtgggaccttaggaatgaggactggggcacctggaaaatgccattttttggaaaataaaatttaagaacagct

SEQ ID NO: 22599 - DNA, 4694 bp, Homo Sapiens
caagatggcggcggacgtgtccgttactcaccggcccccgctgagccctaagtctggggccgaagtcgaagccggcgatgccgcggagcgccgggcgccggaagaagagctgccgcctctagatccagaagagatccggaaacgcctggaacacaccgagcgccagttccgtaaccgccgcaagatactgatccggggcctcccgggggacgtgaccaaccagccttcgtgaccctgctgaatggggagcaggccgaggccgcaatcaatgctttccaccagagccgcctgcgggagcgtgaactgtcggtgcagctgcagcccacggatgccctgctgtgtgtggccaacctgccccccagcctcacacagcagcagttcgaggagctggtgcggcccttcggcagcctggagcgctgcttcctggtctacagtgagcgcactggccaatccaagggctatggctttgctgagtacatgaagaaggactcggctgcccgtgccaagtcggacctgctgggcaagccgctgggaccacgcaccctctacgtgcactggacggatgccgggcaactgacgcctgcccttctccactcccgctgcctctgtgtggaccgcctgccacctggcttcaacgatgtggacgctctgtgccgggcgctgtcagctgtccacagccccaccttctgccagctggcgtgcggccaggatgggcagctgaagggcttcgcggtgctggagtatgagacggctgagatggcggaggaggcacagcagcaggcggacggcctgtccctggggggcagccacctgcgagtctccttctgcgcccctgggccccccggccgcagtatgctggccgctctcatcgctgcccaggccacggccctcaatcgggggaagggactcctccccgagcccaacatcctgcagctgctcaacaacctgggcccatccgcgtccctccagctgctgctcaaccccctgctccatggcagtgcgggggggaagcagggcctcctgggtgcccccccagccatgccgctgctcaatgggccagccctgtccacggcgctgttgcagctcgccctgcagacccagggccagaaggtaacacacgcatccccctcacccactgctctacagcccctacaggctcttttcaacacagctggtgcgatcggtggggtggggggacctctggctgtgccctgggggcgcagaaccagggtgagggcgactcccccaaacccctgcctttcccacccacatccccatccccctctggcaattgctcatgatggttcgccatctttccctccattctgagagcgcccctggacttggtgcctggggtggggtcaggggacctggacacgcccatttacagcctgaaactgggtgtgggctgggagcgccgctgctgggcaccagtttgtgaatagactctgctcggaagctctatagacatgcctgggaaaaaactccaggtctatcccctcagtgtgtgcgcacacacacacgcacacctagaaacacaggtatacatatagactcacacatacaaagatgcaaatatacacacagagacatagacacacaaagacataagacaaagacacacacatagacacagacacacatatagacacaagacagactcatgcacacagaaacaaagacacagatatacacgcacacacacacacagacacacacacacatagacatacacccatgctccgtcctgtctggtgtggttccctggattctaagtcaggtgtgtctgtctggtggtaactgacagaatatgtgagcctgtgggtctggccttctgtgactaaaagtggctgaaacactgtgtggctgtcccattccatgtggctgcagttgatactgtgctgcaatcattggccagggaactggggcctggagctcaggagaccctcggtcaccatggctgatgggacagtgatagagttggagtgtggcgggcactggggaaccctgtgcctgtctgcccaggatcggccgtgccctggagttggggtgtgtctgccaagactctgggccacacctgtctgcttccctgggccaccctgcccccatctgcaactgtctgtgctctgtccctagaagcccggcatcctgggagactcacccctgggcgccctccagcctggggcccagccagccaaccccctcctcggggagctgcctgcaggtaacgcagaccctgcccacacggtgtcccccagccacttccccttccttccctgctacgtggcctcgggtgagtgacccaacctctgggtcccagcgcccttgtccatcagttgggtgccctccactcagggcccagggatgagctctgctcagtggccagcatggatttgtctcttgacccctgggccctggtccaggtgggagctggagggccctggggagaggggtcctgtgagcctgggcccctgaaatcctccttccctccctaggagggggcctgcccccggagctgccgccccggcgagggaagccaccacccctgctgccatccgtgcttggccctgctgggggtgaccgggaggccctgggcttgggtcccccagcggcccagctcactcctccccccgcccctgtggggctccgaggctctggcctcagaggcctccagaaagacagtgggcctctgccgacgccccctggggtctcactgctgggggagccccccaaggactaccggattcccctgaatccctacctgaacctacacagcctgctcccggccagcaacctggcgggtaaggaggcccggggctggggaggcgccgggagaagccgccgcccagctgagggccccccaactaaccccccagcccctggaggtggcagcagcagcagcaaagccttccagctcaagtcccgcctgctcagccccctcagcagcgcccgcctgccccccgaaccaggactgtctgacagctacagcttcgactacccctcggacatgggacctcggcggctcttctcccacccacgggaaccagcccttgggcctcacggacccagccgacacaagatgtcccccccgcccagtggcttcggcgaacggagcagcggtgggagtggcgggggccccctgtctcacttctattcaggctcgcccacttcctacttcaccagcggcctgcaggctggcctcaagcagagccacctcagtaaggcaatcggctcttccccgctggggtccggagaagggctcctgggcctcagccccgggcctaatggtcacagccacctgctgaagaccccactgggcggccagaaacgcagctttgcccacctgctgccctcgcccgagcccagcccagaaggcagctatgtgggccagcactcccagggcctcggcggccactacgcggactcctacctgaagcggaagaggattttctaagtggctggcaccagagataactcaagggcctgcaccaaatcgcttttgggttttctgatgttttgttttgtgttttttttaaaccattttctctctttcggtaatagaaaaatctctgaaagactttactgaccaatcagccggagccccaggagcccaaggggtgtgggggagtctggaggcctcattatgtctctggcttgctccccacgctgaaaccctgcagccttaagagagaggggccccggcctgctctccctccctccccccatctcctcctccgctgtgcccgtctctccggagccctcctgcctcattgctcctgtaattttggcctttcgagtgccttggaggtttccctgacctcccgtgaagatacagagactgtctccttttttttttaactttgacaactgacttctgtttccttttctaagttttatttttcaaaccaccccggacagcccccagctctgattccttcaaggcccggcctgtccgggccaccattccacaccttgcggtttgaaacagctgtttttcccacatttgctgcaggcatggctgtctcctgcccctgcctgcccatctggcctataccccagccgtggggcccggggtccctgccgcagccccctccccttctgatgccttaaaagctgggccccaggccctgctggccagagccacagatgccaagctctgggagcttgactatggaccaaacagctctggcctagggattgggccaccctacccaggatctccaccctggggacagtagaaggggaaagccttcatcttggcgaaccggccccaccaccccctcctacccgggcctccgtgcagagatgggctttctctgccagtcccctgctgtctgtctgtgggagtcggacattgtgcccatctcccggagcctctgctgtcactcgcttgttgaagatgaattcttgaattctgcctgcccacccccggccagatccctggagctggcctccttccagcccagtgccagaaaccagcactccatgaagataaactctgggcccgcccaccagcaggacctgtcgacctgaggtgaccctgggccttgcccccagccaactgggccaccagcttccctcccttgactctgggggtccacatccactccaaggggactattcccccgaccccaccccagtctccccacacggacctttgctgaattaaagtttgtaagtaaatggttttaaag

SEQ ID NO: 22600 - DNA, 3501 bp, Homo Sapiens
gagaattcatactggagagaaaccctacacatgtggagaatgtggcaaaacctttagacagtccgcaaacctttacgtacataggagaattcatactggagagaaaccttacaaatgcgaagactgtggcaaagcctttggacggtacacagccctgaatcaacacaagaaaattcatactggagagaaaccttacaaatgtgaagagtgtggcaaagcctttaatagttcaacaaaccttactgcacataagagaattcacaccagagagaaaccctacacatgtgaagatcgtggcagagcctttggattgtccacaaacctgaatgaatataagaaaattcatactggagataaaccctacaaatgtaaagaatgtgggaaagcctttatacattccttgcacctgaataaacatgagaaaattcatactggaaagaaaccctacaaatgtaagcaatgtggcaaagtcattacctcatcctcaagctttgctaaacataagaggattcatactggcgagaaaccctttgaatgtttagaatgtggtaaagcgtttactagttccacaacccttactaaacataggagaattcatactggagagaaaccctacacatgtgaagtatgtggcaaagcctttagacagtccgcaatcctttatgtacataggagaattcatactggagagaaaccctacacatgtgaagaatgtggcaaaacctttagacagtccgcaaacctttatgtacataggagaattcatactggagagaaaccttacaaatgtgaagagtgtggcaaagcctttggacggtacacagacctgaatcaacacaagaaaattcatactggagagaaactttacaaatgtgaagagtgtggcaaagactttgtatggtacacggacctgaatcaacagaagaaaatttacactggggagaaaccttacaaatgtgaagagtgtggcaaagcctttgccccatcaacagacctgaatcaacacacgaaaattcttactggagagcaaagttacaaatgtgaagagtgtggcaaagcctttggatggtccatagccctgaatcaacacaagaaaattcatactggagaaaaaccttacaaatgtgaagagtgtggcaaagcctttagtaggtcaagaaaccttactacacataggagagttcacactagggagaaaccctacaaatgtgaagatcgtggcagatcctttggatggtccacaaacctgaacgaatataagaaaattcatactggagataaactctacaaatgtaaagaatgtgggaaagtgtttaaacagtcctcacacctgaatagacatgagaaaattcatactggaaagaaaccctacaaatgtaaggaatgtggcaaagtcattacgtcatcctcaagctttgctaaacataagaggattcatacaggtgagaaaccctttaaatgtttagaatgtggtaaagcgtttactagttccacaacccttactaaacataggagaattcatactggagagaaaccctacacatgtgaagaatgtggcaaagcctttagacagtcagcaatcctttatgtacataggagaattcatactggagagaaaccctacacatgtggagaatgtggcaaaacctttagacagtctgcaaatctttatgcgcataagaaaattcatactggagagaaaccctacacgtgtggagactgtggcaaaacctttagacagtctgcaaatctttatgcacataagaaaattcatactggagataaaaccatacaagtgtaaagaatgtggcaaagcctttaagtcatactacagcattcttaaacataagagaactcataccaggggaatgtcttacgaaggtgacgaatgtcgcggtctttaaatgctcctcaatcctttctaatcataagataattcataatgaagagaaactctaaaatgtgaaaaatgtgagaaggcttttaatcacacctcaatctgttgtagacataagagtaattatattgatgagaagccaaattaaaattaaaaatgtggcaaagacttccaattctagtcagttcttaatgtaattcctactgaagaaaacacctggaaatacaaaaaatgtggcaaaacttgtaaccaatgcttagcatttttgcacatgatagtatttatatgtgagactacttgtacaaacataaaaatatacaaaagctattgtctacttgaaatttatagttaataaaagcattataaatgtaatttctgttgaaagaccttttagaaaatataggccattaaagtgaatagtcttaagacagagaatacaaagataaagagggctctagtacctgtacttgtatcccagaacttactatatgcattttgtactagaggaaaactctgaagcagttgcttaaactttgttcaacatcagagaatttatattggagagaaatcctacaaatgtaataaatgtggaaaaacctctgttcagaaactgcaggttaagaaaccagaggccaggcgcggtggctcacgcctgtaatcccaacactttgggaggccaaggagggtggatcacctgaggtcgggagttcaaggacagcctgaccaatatggagaaacctcgtctgtactaaaaatacaaaaattagcaggacatggtggtgcatggctgtaatcccagctactcaggaggctgagacaggagaatggcttgaacccaggaggtggaggttgcggtgagctgagatcgtgccattgcactccagcctgggtaacaagagtgaaactctgtctcaaaacaagaaaaaaagaaaagaaacaccagagaatttttactagaatataatttgtaggtgcagtaaatgtgaagaaatatttaggctaaaattaagactatgtaaacatcagaggatttacagtagaaagaactaaggaactaacacttcagactttaaaataaatcagagtattaagtataacaaaagttgaacctgttagaaaatttccttgtatataagttgaaaagtaggtttttgaagagatatattcgaaatatattttttcacttgaaaaaagtaaaaatttttttcaaaagcaaataattcaactctaaaattatactatttcaacattctcatttatgtgaaagcatgtgataaattgttgctgcgtcagagatatgagaaattcctttgcattaggtgggcattattcatagacttctacatgaaagagaagagaaataaaagatgcaccaggaaaatctgagcagagaggcttttagtggttgacttactgagtgatgcctgaagtaggtgttcagagtaatactttgcgttatactgagagagaatctgaattttagtagtaaattgttttgccaactgtatatttatgtaataagtgcaataaaatgcagtaaattttaaaattctcttaagataatgtgtgaacttaatttttgaaataaaaattgttattgtgtt

SEQ ID NO: 22601 - DNA, 4207 bp, Homo Sapiens
gcagggcaggagctgagtacacacacactcggagggcgggcacctcctctccacccccaccccaatctttctggatccagggggcatgtgaggaggggctctgctaggacctgtgccctgggctccagtcaccccagcatccggtgggcaggtttcccaccacccaacccgagggcttggcatctgtgagcccacatcctgcagcaggggccccctctggctctccggccagctaggggacacccgggccctcctctgcatacccccctaccacgtcgcctccgaacttggatggccaggatggggtcccgcggctctctgctcctcgtggaagcagggatctcgctactgggctagcgtgggatacaagaggccctggggagaatgcctggaggagccagcggctgcgggtgcgcaaagggcccgctctagctcagccgccgccgctccgcagtatgaccagtggaccatctccaaggcctgcgggaaaaacttgcctttgcgactggcgcactgccgcagcaccatggaggtggtgcgggagaagctgcgcaagtacgtcttcgaccgcgtgaacatgcacaacctactgatccacctggtgcggcggcgcgggcagaagctggagagcatgcagctggagctggacagcctgcggagccagcccgacgccagcaaggaggagctgcggctgctgcagatcatccgccagctggagaacaacatcgagaagacaatgatcaagatcatcaccagccagaacatccacctgctgtatttggacctgctggattatctgaagacagtgctggcaggataccccattgagctggacaagctgcagaacctcgtggtcaactactgctcagagctgtcggatatgaagatcatgtcccaagatgccatgatgatcacggatgaggtcaagaggaacatgaggcaaagggaggcgtccttcatcgaggagcgccgggcaagggagaaccggctcaaccagcagaagaagctgatcgacaagatccacacgaaggagaccagcgagaagtaccgccggggccagatggacttggacttcccctcgaacctgatgagcacggagaccctgaaatgacatcactagccgcttcctggcccagaggaacacggaggagaacctggagctgcagatggaggactgtgaggagcggcgggtgcagctgaaggccctggtgaagcagctggagctggaggaggccgtgctcaagttccgccagaagcctagctccatcaggtgccccgggcttccggggctgcgggccacccaccccagtctcacaaaggccccgggctgcagccaggctgggagctgggagtatacccactgccaacaagcctgtgtgtcccacagaggggccaggggactccacttgcacacacctgagcttctgagtccctgattctggcacagcacccaactcaggactgggctcctgggtggcccaccatggctctcgggcctgtgcccctcactgctgtgtccctattgccttctgcagcttcaagtccgttgagaagaaaatgacagacatgctaaaagaggaagaagagaggctccagctggcgcacagcaacatgaccaagggccaggagctgctgctgaccatccagatgggcatcgacaacctctatgtccggctgatgggcattaccttgcctgcgacccagagagaagtggtgctctccaacaccctcgatttgaacagcaagctggcgtactgcgaggggaagctcacgtacctggctgacagagtgcagatggtgtccaggaccgaggagggcgacacaaaggtgagggacaccctggagtcctcgactctgatggagaagtacaacaccaggatcagctttgagaaccgggaggaggatatgatcggactgctgcggacgctggggcgaccggggtctcggagaggagcacgggacacgcaggatcgggggaggttctgcgtaaggaggcagcccgggcccggaactgcgcgccagaaccgcgtgcgcatgcgccgaccgcgcgcgccgcgcccccgcggccctcgcggcgccccgtagccgcgcacccctcccgtcccgccgagccggcgccaagatggcggcgctgactcctggagagcggtcgcgccggaggccgcgggggccggagcggagcagccgcggctgaggttcccgagtcgccgctcggggctgcgctccgccgccgggaccccggcctctggccgcgccggctccggcctccgggggggccggggccgccgggacatggtgccagtcgcaccccttccccgccgccgctgagctcgccggccgcgcccgggctgggacgtccgagcgggaagatgttttccgccctgaagaagctggtggggtcggaccaggccccgggccgggacaagaacatccccgccgggctgcagtccatgaaccaggcgttgcagaggcgcttcgccaagggggtgcagtacaacagtgagtgcggcgggccgggggggcgcgggagcgccgcgcgggtctccgaacccaggccccgggcgccgcgcggtggtgggtgtcggtctcacctgcttgccggttgtggggtgcgctgggcccgccgggtgctccgggagcgggggcgcgggccaggggacgcgaggagaggccaggccagggccgggtcctcgcggcccccgagccgcgggtcgtttcccagccgcactcgcctgccgcgtgtcgctcccgccgcgctgtgcagtggagcgggtcggcggcggcggggttggcccggctgcccggcccgggggtgattacataatgccaagcagggcccgccggcccggggcgccgcgcccccgacgctccacggtgcccagccccgggcaccactcacctgcaggaggtgcggggaacccagccggccttggcgctttcagcgggatttttctttgttgacttcctactgagtttgaagacagaatattagctacgccacacattctcgccttttttttaaaagaagcgtttgtaagagacgtatctagaaaagctccagaaggcacgggctgacttgcgactgtaggagacatcccatttctcgtaggaaggaggagtcatttacggactcctgagtgcctgggacgctccattcctttgttataaattgtgtaaattgtcctcgacctcttatgagtttttccatcttgcgggctctttcccagtagtttttgaaagcttttatgtggttccctgttttgacattgcttccctcttagccatttccgtatgtttctatgaggttttaggacgctacgcctatccagttttttggtcactttaaggggagccttagagcctccgtgatatttccatggtaatgtagaattttaagaactaatgatcagaaagactcttgtgcaggtttaaaagcaagttcatgaattcgcgtgccgtgtgcacggagagaggccgtagttcctggggctggagctagtccaggaggacagtgaagatgtcgccttccttagtcccccggcctgtgagcaagaggaagctgcagaccactcgggccaccctcacccagacacctttagcagtaagcaagataaaacaacttcttaaagataagtctgagcatctaggtatgaaagttggtgtccgggccgggcacggtggctcatgcctgtaatcccagcactttgggaggccaaggcgggcagatcacgaggtcaggaattcgagaccagcctggccaacatagtgaaacaccgtctctactaaaaatacgaaaaaaaaatttaaaagaaagttgatgtccgaaccaagggccgtattggcttttcttatactctagaacatacgacgacaaagaagattttgatgaagttcaaattagagtcagcgtgctcatcagaaagaaagcgcagccaacacgtttaggaacagaaacggattatgttgaagacaaacaatccattgcgtttgtgttcagtaacccaagcatcaaaggaacttgtggctggggagaaggcttgactatttgaaatctcaggactcctctgtccaggagctcccagactcccgtggagtggaagcctgggggctcgctgaagaagtcacgtgactggaacgtgcttaatgcttggctgtctggtaaggaaaataaagtggtgcattttgaataaaaataaaagctgatttt

SEQ ID NO: 22602 - DNA, 7327 bp, Homo Sapiens
gccagggtaggatggtacacacatgggtggctgcttctgcatccccagggagcggagtctgacccggggcccaggtaaagaaactccttccaaggatccaactgtatcgagtgagtgtatagcctcatctgaatacaaggaaaaatgttttctgccacagaacattaatccagacctgacactctccttctgtgtaaagagccgctccaggaggtgtgtaaatggacccctacaggaagctgctcggaggcggctctgggcactggagaatgaggaccaggaggtgcgcatgctgtttaaggacctctcagcaaggttggtcagtatccagtctcagagggcccagtttctcatcaccttcaagaccatggaggaaatctggaagttctccacctaccttaatttaggctacgtatccatgtgtctagaacatctcctctttgaccacaagtactggctcaactgcatattggtggaggatacagagatccaagtgtctgtagatgataaacacctggaaacaatatacctgggactcctgatacaggaaggccacttcttctgcagagccctgtgctccgtgactccaccagccgagaaggaaggggaatgcttgacactttgcaagaatgagttaatctcagtgaagatggcagaagctggctccgagttggaaggcgtgtctttggtgacaggtggttcctaaagaattatccaggaagctgtggcctttccaggaagagggattggacaggctcctatcagattggcagaggacgctgtaaggccttgacgggttatgagccaggagaaaaggatgaactgaatttctaccagggagaaagcattgagatcatcggctttgtcatacctgggcttcagtggttcattggaaagtcgacaagttcaggacaagtgggctttgtccccaccaggaacatagatcctgattcttattccccaatgacttggtgtgtttcttcaatatgaagattcatgtctttcttcaattctggaaaattttcagtccttcttcctttgaatattgcctctctctcgttctttttagtctctcttctggaattcctattagaggagcaggaactctgcctttctcagtgatgaggagagatgctccctgttggccctgggaagtgataagcagactgagtgttccagcttcctccacactcttgctcgcactgacatcacatctgtctaccggctcagtgggtttgaatccatccagaatcctccaaatgatctgagtgcatcccagcctgaaggcttcaaggaggtcaggcctggcagagcctgggaggagcatcaggccgtggggtccagacagtccagcagctctgaggactccagcctggaggaggagctcctctcggccacctcagacagctatcgcctgccggagcctgatgaccttgatgacccggaactgctcatggacctaagcactggtcaggaggaggaggctgagaacttctcccccatattggcttttctggatcatgagggttatgctgaccactttaagagtctctatgacttctccttctctttcctcacttcttccttttatagcttctctgaggaggatgagtttgtggcctacctggaggcatcaagaaagtgggccaagaagagccacatgacctgggcccatgcccggctctgcttcctcctgggccggctgagcatcaggaaggtcaaactctctcaggccagggtgtacttcgaggaggccatccacattctcaatggagcatttgaggacctatccttggtggccactctgtacatcaatttggctgccatctacctgaaacagaggctgagacataaaggctccgccctgttggaaaaggcaggtgccctgctggcctgcctgcctgaccgtgagtctagtgccaagcatgaactcgacgtggtggcctacgtgctgcgccaggggattgtggtgggcagcagcccgctggaggccagggcctgctttctggccatccgcttgctcctgagcctaggccggcacgaggaggtcctgccctttgccgagcgcctgcagctcctctctggacaccctcctgcctctgaggctgtggccagtgttttgagttttctgtatgacaagaaatatcttccacaccttgcagtggcctctgtccagcaacatggtatccagagtgcccaagggatgtctcttcctatttggcaggtccaccttgtcctccagaacacaaccaagctccttggctttccttccccaggctggggtgaagtttctgccttggcctgcccaatgctcagacaggccctggctgcctgtgaggaactagcagaccggagcacccagagggccctgtgtctcatcctttccaaagtgtacctcgagcacaggtctcctgacggtgccatccactacctgagccaggccttggtgctagggcagctgctgggtgagcaggaatcctttgagtcttctctctgcctggcatgggcctatctcttagccagccaggccaagaaggctttggatgtgcttgagccactgctatgctccctgaaggagacagagagtctcactcaaaggggagtcatctataacctcctgggacttgcactccaaggtgaaggccgggtgaacagggcagccaagagctatcttcgggccttgaacagagcccaggaggtgggagatgtgcataaccaggcagtggctatggccaatcttggccacctgagccttaagtcctgggctcagcatccagccagaaactatctcctgcaggctgtacgactctattgtgaacttcaggccagtaaggagacagacatggaattagtacaggtgtttctctggttggcccaagttctggtgtctggacaccagctgacccatggccttctttgttatgaaatggcattgctgtttggcttaaggcatcgacatctaaagagtcagcttcaggccaccaaatccctctgccatttctacagctctgtgtccccaaaccctgaggcatgcatcacctaccatgagcactggctggccctggctcagcaactcagggaccgggagatggaagggaggctgctggagtccctggggcagctttatcggaacctaaataccgccaggtccctcaggaggtcactcacatgcatcaaggagagcctgcgtatcttcattgacctgggggagacagacaaggctgctgaggcctggcttggggcggggcgactccactacctcatgcaggaagacgagctggtggagctgtgcctgcaggcagccatccagacagccctgaagtcagaggagcctttgctggctctcaaactttatgaagaagcaggtgatgtgttcttcaatgggacccgccacaggcatcatgcagtggagtactaccgagctggagctgttcctttagcaaggaggttgaaggcggtgagaactgagctccggattttcaataagctgacagagctgcagattagcctcgaaggctatgagaaggctttggaatttgccaccctggccgccaggctcagcacaatcacaggagatcagaggcaagagctggtggcctttcaccgcctggctacagtgtactactccctgcacatgtatgagatggctgaggactgctacctgaagaccctgtccctctgtccaccctggctgcagagtcccaaggaggccctgtactatgccaaggtgtattatcgcctgggcagactcaccttctgccagctgaaggatgcccatgatgccactgagtacttccttctggccctggcagcagcggtcctgctgggtgatgaggagcttcaggacaccattaggagcaggctggacaacatctgccagagccccctgtggcacagcaggccctccgggtgctcctcagagagggcgcggtggctgagtggtggtggcctggccctctgaggaaagctgtcctgtctctggacatttggcatggccagactctgaccccactgccctaggctcttaaatactcattgggagggtccgagtccttacctggcctagccccctcatttcacaagaagaagaatgaagtccaggaggagaagggctcattgcaggccacagaaagatttgatggtgcagcgatgagaattcctggttccaggctttgcatctggagcctttaccggttgactgttgccttccacacaaacagcctctgaaaagcactttctccatacataattctggagaagatgagggatcttgccctccaggagccttccttcctcccccaatgaggaaatcagtcactgcactggtgcaaaggcaagcagattggaatttgtgctcttcaccgattttctcagggaaagaccccttccccttgccagcagaggaacctgtagttttttccatttctttcttcagaaccaaagtatgtatcactcctcatgctcacagggattgacaggagagaattcaccaggatcttagctcaaaagacacagcctcagaatggccagatggattgcacgaaacctgacttggattcaccatcttcctcctgccataaggctgtgctcccacataacctcccagaagctccagggaagctttccaagagcaaaggcttggaaattgaatgttaagaaaattatgacataaattacatgtaaatagtgtatatgattaaatattgtccagttacatttacacacacattttgtctcatccacaatgggggcagatgagatggaggacttgatggatgggagagaataccaatacatgtctttttttttttttttttttttttttgagacagtttctcctctgttgcccaggctggagttcagtggtacagtcagggcttcctgcgacctcacactccggggctcaagtgatcctccagtgtcaacctcctgagtagctggaactacaggcatgtgccatacccaactacaaggcatcttattgatttcagggcagctgctttacaaagcatctctattaataacatcactgcatagcacactgagtggcctaaaacacttataatctcatggtttctgaagggcaggaatccaagcatgacttagctgagcccaccagcttagggtggttcacaggctgcaatcagctggggctgcagttatctcaacttcaactagagaaggatgggcttccaagctcacccacacagctgttgttaggagtcagttttttgctagctgttggccagaggcttcctgcagccacttgccacgtgggcctctccacagggcagtcacaacatggcaccatgcttcactagagggagcaaacaagaggagcaagaaccagagtgagcaggagaaaagggagtgactctttctataacctgatcacagaagtgacatctccttagtcttgcctattcaattcataataaatgagtcactaggtctagctcccacaagaggggagtgtttaccaacagcttgaataccagatggtgaggaatcattggggatcatttcagaagtgacctaccacagtatctgagttctttgataatgaaattgggaattctctaatttcagcaaactgaaaatacggtccactaaccagcagcatcagcatcacctgtgagattgtttgaaatgaaaatctgtggccccacctatgatctctgaatcagaatctctggatcccagaacgctgactcgtccaagctttcctggtgattttaatgcaccctaaagtatgggaagcaccactgcagggcaagagccctcagatagtgtgcataactattacctggtgaggttgtggaacatgaacttcttggtttctatctctaataattctgattcagtagatctgtgatgtatcccaggaacatgcatttttagaaagcaactcaagcaagcctgatgcaggtggttcacccttgctccttttctgtgaaccacaaggataccagccataattccctgcatctgatgcccatcagcttagcttttattatcagaccatctgcccttaatttctagcttcttgggctgaccagatgattggttgtatgaaagggtgagatgggagtggtgagttgagccgccattgcatcttctagtcatcaaggttgtctactaattggcacacattttctcttagagatgtggttggttgtcaaaaggctgtctactctagagagtattctccaggaaggagaagcttccagttgtctaattagtaaagttatctaatctactaccatggagaatagatgtggttttgcccccaccacaagctgtaaaagccccaagctgggagggacgttgcggttgaggctattcagtctaatctcccgtgcatagtcctttcaacaacattcctgggagacagtcaggggcacacacattccagaacagttacatatcgtgtatttgaagaaggctcacacagccctggaaaccatgccactggccattccccatctgactcaggttacagatcccctcccttttcccactgaccactcactctcctctggccagatttgtttctgtttctctgaaagagcagttcccacaactgcatgaggcttttgatattggccggtgggtgaagagtacagagggatgttactatacttaatttgattcttcctctccccagcagccacatctgtccttggcttccattgagctttataatcagttgaaacttctgtgtcttctgacttgaacttctgtttggacagatctttctcaattgctgcaaatatgcacatgcatttgcatatgcatacacatacacacacatacgtgaagagcgttgtttctatccatgttacatctccttggaaattttagctaaaatttcccaattctgtgcactttgatttacctataaatctgatgaatttactcataaccaggtcagttataaaaatgtttagcatgtttccaaagacaagggtaagactatttttttaaaataagaaaaacattgtgctatataattgcaattactacattctatatgtaaatcgcttgctaaaactcttttaaaaagtgtttaaaattttcatttttgaaatgtgggccaactattccctttggaaacatgttgatgctgtctttttttcatgatccacagagagtaaagcggtgattggatttggtctctacttaaacatttaaaaaaataagtgtatcatagccaaacatgatctagttaccctctttattctaattgttccctcaaatcttatatgggctgtgtgactgctggctccttacatctaatctaaataaagaacaagaagggcattgc

SEQ ID NO: 22603 - DNA, 2450 bp, Homo Sapiens
gccggcattcatttaaggcctaaggatgaaggcgagaagaaataaaaaacagatcccaagctttcgcaagttaataaaaactagtaaagtcaaacttgaaaacaagctaaaaaataagcagtttaaacaacaaagcactctcaagaagtaccgaaaagaacagaggaaactaaggcaagctgtgaaagatgctgtgtctaagaaacccattccattggagaacccaaaggaaaagcgaccaggtaaaaggattgagagggaagaagaggaagaagaagaagcccttcctttagatatgatggatgaagatgacttacagttaatgaaggatttaggacaaagagtatcttttctaacaagagatctttcttctagtgagcctgttcatgcgaagaaacggaagcatgaacgcattatagataaatatgaaaaaataccaagaactctgcaaactgcaccagagaaggaactgattcatttacttcctatcaaagataaaagtggtataatcccacagactagggagaagccagttactgatagtaacaaagatgaagaggatcaagaagaagagagggaacttgaggaagagatcattgaagatcctattcaagagctgaccatagaagaacatttgattgagagaaagaagaaattacaggagaagaagatgcatattgcagccttggcatctgccatattatcagatccagaaaataatattaaaaaattgaaagaattacgttctatgttgatggaacaagatcctgatgtggctgttactgttcgaaagctggtaattgtttctctgatggagttatttaaagatattactccttcatataaaatccggcccctcacagaagcagaaaaatctactaagacccgaaaagaaacccagaagttaagagaatttgaagaaggcctggttagccaatacaagttttatttggaaaatctggaacaaatggttaaagattggaagcagaggaagctgaagaaaagtaatgtagtttccttaaaggcatacaaaggactggcagaagtcgctgtgaagagcttgtgtgagctgttggtggcactacctcattttaactttcacaacaacatcatcgtattgattgtccctctcatgaatgacatgtcaaaattgatatctgaaatgtgttgtgaagctgtgaagaaactctttaagcaagataaattaggccaggcttctcttggtgtaattaaagtgatttctggttttgtgaagggcagaaattacgaagttaggccagagatgttaaaaacatttttatgcctaagaatcaaggaagtagaagtgaaaaaagatacagaagacattaataaaccaaaaaaatttatgactttcaaagaaaagagaaaatctctatcaagaatgcagagaaagtggaagaaagcagaagagaaactagagcgagagcttcgagaggcagaagcttcagagagtactgagaaaaaacttaaactgcacacagagactctgaatattgtgtttgtaacctacttcagaatattgaagaaggcccagaggtcacctctcctgccagcagttctagaaggtcttgccaagtttgctcaccttataaatgtggaattttttgatgatctgttagtagttcttcatactctcattgagtctggtgacctaagctatcaagaaagtcttcactgtgtccagactgcttttcatattctttctggacaaggtgatgttctgaatattgatccattgaaattctacacacatctctacaaaacactgttcaaattacatgcaggtgctaccaatgaaggtgttgagattgtactccagtgccttgatgtcatgctaactaagcgcagaaagcaagtttctcagcagcgagctcttgccttcatcaaacgcctttgtacccttgctcttcatgttcttccaaattcaagtattggcattttagcaactaccagaatattaatgcatactttccccaaaacagatctactgcttgacagtgaatctcagggaagtggagttttccttcctgaactggatgagcctgagtactgcaatgctcagaacactgctctgtgggaactgcatgctctgcggaggcattatcatcccatagtgcagagatttgcagcccacctgatcgctggagcaccttctgaaggctctggagcactcaaaccagagttgagtcgaagatctgctactgaactttttgaggcatatagcatggcagaaatgacattcaatcctcctgttgaatcttcaaaccccaaaataaagggtaaatttttacaaggggattcatttttgaatgaagatttaaatcagctaatcaaaagatactccagtgaagttgctactgaatcgcctctggatttcacgaaatatttgaaaacatcactacactagtagaggaatgaagtcagtggac

SEQ ID NO: 22604 - DNA, 1746 bp, Homo Sapiens
atgtgggggcgcacggcgcggcggcgctgcccgcgggaactgcggcgcggccgggaggcgctgttggtgctcctggcgctactggcgttggccgggctgggctcggtgctgcgggcgcagcgtggggccggggccggggctgccgagccgggacccccgcgcaccccgcgccccgggcggcgcgagccggtcatgccgcggccgccggtgccggcgaacgcgctgggcgcgcggggcgaggcggtgcggctgcagctgcagggcgaggagctgcggctgcaggaggagagcgtgcggctgcaccagattaacatctacctcagcgaccgcatctcactgcaccgccgcctgcccgtgcgctggaacccgctgtgcaaagagaagaaatatgattatgataatttgcccaggacatctgttatcatagcattttataatgaagcctggtcaactctccttcggacagtttacagtgtccttgagacatccccggatatcctgctagaagaagtgatccttgtagatgactacagtgatagagagcacctgaaggagcgcttggccaatgagctttcgggactgcccaaggtgcgcctgatccgcgccaacaagagagagggcctggtgcgagcccggctgctgggggcgtctgcggcgaggggcgatgttctgaccttcctggactgtcactgtgagtgccacgaagggtggctggagccgctgctgcagaggatccatgaagaggagtcggcagtggtgtgcccggtgattgatgtgatcgactggaacaccttcgaatacctggggaactccggggagccccagatcggcggtttcgactggaggctggtgttcacgtggcacacagttcctgagagggagaggatacggatgcaatcccccgtcgatgtcatcaggtctccaacaatggctggtgggctgtttgctgtgagtaagaaatattttgaatatctggggtcttatgatacaggaatggaagtttggggaggagaaaacctcgaattttcctttaggatctggcagtgtggtggggttctggaaacacacccatgttcccatgttggccatgttttccccaagcaagctccctactcccgcaacaaggctctggccaacagtgttcgtgcagctgaagtatggatggatgaatttaaagagctctactaccatcgcaacccccgtgcccgcttggaaccttttggggatgtgacagagaggaagcagctccgggacaagctccagtgtaaagacttcaagtggttcttggagactgtgtatccagaactgcatgtgcctgaggacaggcctggcttcttcgggatgctccagaacaaaggactaacagactactgctttgactataaccctcccgatgaaaaccagattgtgggacaccaggtcattctgtacctctgtcatgggatgggccagaatcagtttttcgagtacacgtcccagaaagaaatacgctataacacccaccagcctgagggctgcattgctgtggaagcaggaatggatacccttatcatgcatctctgcgaagaaactgccccagagaatcagaagttcatcttgcaggaggatggatctttatttcacgaacagtccaagaaatgtgtccaggctgcgaggaaggagtcgagtgacagtttcgttccactcttacgagactgcaccaactcggatcatcagaaatggttcttcaaagagcgcatgttatga

SEQ ID NO: 22605 - DNA, 2193 bp, Homo Sapiens
atgtctaagaactcagagttcatcaatctgtcatttttattagatcatgagaaggaaatgatcctgggcgtcctaaagagagatgaatatttgaaaaaagtggaggacaagagaataaggaagctgaaaaatgaactcttagaagcaaaacgtagaagtgggaaaactcaacaagaggccagcagagtttgtgttcactgtcacagaaacctgggcctaatctttgaccggggagacccttgtcaggcttgctcactgagggtatgcagggagtgtcgagttgcaggccccaatggcagctggaagtgcactgtctgtgacaaaatcgcgcagctaaggattataactggtgagtggttttttgaagaaaaggcaaaacgtttcaagcaagtcaatgttctcggcactgatgttgtccgacagtccattttaagaagaagtccaggagctgaagaagtacagagccaagagcaaacccgccaggatgcagaaaagtcagacacttcacctgttgctgggaagaaggccagccatgatgggcccaagagaaagggatttcttcttagcaagttcagatcggcaaccagaggagaaatcataactcccaaaactgacactgggcggagctatagcttggacttagacggtcaacattttcggagtttaaaatcacctcctggttcagacaggggaagcactggctcatcagatctcaatgaccaggaacctggtcctaggaccccgaagagcagtcggagcaatggtgtgaccccaggcactcagagttcaccagccccaagcacacgaactgtgacctcagtcatcagtagagagtatggttttgaaaattccatggatttggctgctattgaaggtacctctcaggagctcacaaagagtcaccgcagaaacacttctggcacaccttccatagcagtgtctggaacctctctctcctcagatcagagtcgatctgagttagatttgagtgagtcatttacagaagactcagaggatactgtaagcataagaagcaagtctgtccctggggctttagacaaggactccttggaagagactgaagaaagcattgatgccttagtgtcctcgcagttatctacaaacactcaccgtctggcaagtggcctatcaactaccagccttaacagcatgatgagcgtttacagtgaaacgggagactatggcaacgtgaaagtcagtggtgaaatccttctccatatcagctactgctacaaaactggtgggctgtacatttttgtcaagaattgcagaaatctggccataggagatgaaaagaaacagaggacagatgcttatgtcaagtcatatcttcttcctgacaagtcccggaacaacaagcgtaagaccaaaatcagaacaggcaccaatccagaattcaatgaaacactaaagtacactatcagccatacccagctggaaacaagaactctgcagctctcagtctggcactatgatcgatttggacgtaatagcttcctcggggaagtagagattccttttgactcatggaactttgaaaatccaactgatgagtggtttgtgcttcaacccaaggtggagtttgctcctgatattggccttcaatacaaaggagagctgacagttgttttacgttacattcccccagaagagaacctgatgcttccaccagaacaactccaaggaaataagacttttaaaaagggaaagaagaaggagtcacctgtaatctctggaggaatactagaagtgttcatcaaagaggcaaagaatttgacagcagtgaagtcaggaggcacttctgatagctttgtgaagggctacctgctccctgatgatagcaaagccaccaagcacaaaactctggtaataaaaaagagtgttaaccctcagtggaatcatacattcatgttcagtggcatccatccccaggatataaagaatgtttgcctagaacttactatctgggacaaggaggccttttccagcaacatctttctgggaggagttcgtttgaattctggaagtggtgtgagccatgggaagaacgtggattggatggactctcagggggaagagcagcgcctttggcagaagatggccaacaaccctggaactccctttgagggtgtactcatgcttcgttccagcatgggaaaatgtaggctctaa

SEQ ID NO: 22606 - DNA, 3770 bp, Homo Sapiens
cgctagagcgacatgatggtggaatctgcctcggagacaatcaggtcggctccatctggtcagaatggcgtgggcagcctctctgggcaagccgatggcagcagcggcggggccacagggacaactgcaagtggcacgggcagggaagtgaccacgggtgcagacagcaatggtgagatgagtcccgcagagctgctgcacttccagcagcaacaggctctccaagtggcccggcagttcctgctgcagcaggcctcaggcctgagctccccagggaacaatgacagcaaacagtctgcctctgctgtgcaggtgcctgtgtcggtggccatgatgtcgccgcagatgcttaccccgcaacagatgcagcagatcctgtcgcccccgcagctgcaggccttgctccagcagcagcaagccctcatgctccagcagctacaggagtactacaagaagcagcaggagcagctccacctgcagctcctcacccagcagcaggctgggaaaccgcagcccaaagaggcactggggaacaagcagctggccttccagcagcagctcctgcaaatgcaacagttgcagcagcagcacctgctcaacctgcagaggcaggggctggtcagcctgcagcccaaccaagcctcggggcccctccagacccttccgcaagcagctgtttgcccaacagacctgccccagctgtggaagggcgagggtgcccccgggcagcctgccgaggacagcgtcaagcaggaggggctggacctcactggcacggccgccaccgctacctcgtttgccgctccccccaaggtctcaccccccctctcccaccataccctgcccaacggacagcctactgtgctcacatctcggagagacagctcttcccacgaggagacccccggctcccaccccctgtacggacacggagagtgcaagtggccaggctgtgagaccctgtgtgaagacctgggccagtttatcaaacacctcaacacagagcacgccctggatgaccggagtacagcccagtgccgggtacagatgcaggtggtgcagcagctggagatccagctcgccaaggagagcgagcggctgcaggccatgatggcccacctgcacatgcggccctcggagcccaagcccttcagccagccactgaacccggtccccggctcctcctcattctccaaggtgaccgtctctgcagcagactcattcccagatggtctcgtgcaccccccgacctcggccgcagcccctgtcacccctctacggccccctggcctgggctctgcctccctgcatggtgggggcccagcccgtcggagaagcagtgacaagttctgctcccccatctcctcagagctggcccagaatcatgagttctacaagaacgccgacgtccggccccccttcacctacgcctccctcatccgccaggccatcctggaaacccctgacaggcagctgaccctgaatgagatctataactggttcaccaggatgttcgcctatttccgcagaaacactgccacctggaagaacgccgtgcgccacaacctcagcctgcacaagtgcttcgtccgcgtggagaacgtcaagggtgccgtgtggactgtggacgagcgggagtatcagaagcggagaccgccaaagatgacagggagccccaccctggtgaagaacatgatctctggcctcagctatggagcacttaatgccagctaccaggccgccctggccgagagcagcttccccctcctcaacagccctggcatgctgaaccctggctccgccagcagcctgctgcccctcagccacgatgacgtgggtgcccccgtggagccgctgcccagcaacggcagcagcagccctcctcgcctctccccgccccagtacagccaccaggtgcaggtgaaggaggagccagcagaggcagaggaagacaggcagcccgggcctcccctgggcgcccctaaccccagcgcctcggggcctccggaagacagggacctggaggaggagctgccgggagaagaactgtcctaagggcctgtagtgaccggcagggctggggtgagacccctcccttccagaatccaggccccatctcccccaactccacagcccctcccgagcctcaaggcaagtccaggactcagaccggggaggcccgggccagcagctcccagtgtgacctgacaaaaacacgtaggggcagggacggtccccacccccagggacacaacccctggtcttggaccagtagaggacacggagggttcagacccctcctcagaccctccccacatctgaaactgcctccccccaaccaccagcagcagcagggccctcctcccccaccagctctccccacagggcccctcagcatcatggagacccgcaggcggggcttagccacccctcaaacccagggccccctggcacctggctctggccgtgttttctggccagaggcccccactttcctaactcgtgctcccttccgccttcttttccgtactgtgaagaaagaactctccaccccagctcccaccctgccctggcctgggtggaggaactgtgcctccatccccagaagaaacagccccctctgctgctggggtgggactgtctgtgtgccctgtgggggtccgtgtgagcaggcccacctggctccagacccgcccccaacctgagacagaaccaggctgagccaggcctccacccccacccccgtttgctgggggctcctccagccgcccccatgggaagaggcctggtaccgcctcacccacagaggtctgtgccaggtgcgcttctgcaggtggagccaagctctccctgaggccagaggcggggcctgggccgggagcccaggggaaggccaggctggaccccggctccacacccacatccagcctgcaggcctctctgcagtcctctcaccctccctcagctccccttcctctgcagtcaccctcagctccccttccttgcccgcctctccccccgccgccccaccagttaaacggatgaccaaagacctttcttatgccggaagcaaaaaccaaaactttttgttggctttttcctttgtcgcctccccagcacctgccctcccagtctcccaccccggccccaggctggaagccctccctccacttaagttattgttttaaaccaaagtttacagtgtctgttggtggccaagaccttctctctccacccctcctccatccaccctgaggaccctggggctcagtggaggcagggccctgcccccctcccttccgctcctgcccagcctgggggaaggagaaaggaggggagaaagcgggctctcaccccctcaggagtgggcacgggagcccttctccctgaccctgggctgcttcctgggggctctccagacccctctctaggaccaagtcacccgtcgtgctgggagtgtggattctagcaaaagagctggaaaaaagtcagactctccacagaccccctatgggggacccccaactcaaggccaaggactgggcgtatcggatgctcataacacccctggcctggcccctttactgagaagactccttggatatttcccaagaaccccccacatacacccctcacaagccacccctcctgagaggcagggggccctccgccccctccccatgtattccccacctgtgttccgtttgaccagcacagaaatattaaacgtcctctattcaccgggaaaaaaaaaaaaaaaaaaaaaaaaa

SEQ ID NO: 22607 - DNA, 3426 bp, Homo Sapiens
gagcaatgatgtagccacctcctaaccttcccttcttgaacccccaggtcccctcttgctgttggctgcacatcaggaaggctgtgatgggaatgaaggtgaaaacttggagatttcacttcagtcattgcttctgcctgcaagatcatcctttaaaagtagagaagctgctctgtgtggtggttaactccaagaggcagaactcgttctagaaggaaatggatgcaagcagctccgggggccccaaacgcatgcttcctgtgatctagcccagggaagcccttccgtgggggccccggctttgagggatgccaccggttctggacgcatggctgattctgaatgatgatggttcgccgggggctgcttgcgtggatttcccgggtggtggttttgctggtgctcctctgctgtgctatctctgtcctgtacatgttggcctgcaccccaaaaggtgacgaggagcagctggcactgcccagggccaacagccccacggggaaggaggggtaccaggccgtccttcaggagtgggaggagcagcaccgcaactacgtgagcagcctgaagcggcagatcgcacagctcaaggaggagctgcaggagaggagtgagcagctcaggaatgggcagtaccaagccagcgatgctgctggcctgggtctggacaggagccccccagagaaaacccaggccgacctcctggccttcctgcactcgcaggtggacaaggcagaggtgaatgctggcgtcaagctggccacagagtatgcagcagtgcctttcgatagctttactctacagaaggtgtaccagctggagactggccttacccgccaccccgaggagaagcctgtgaggaaggacaagcgggatgagttggtggaagccattgaatcagccttggagaccctgaacaatcctgcagagaacagccccaatcaccgtccttacacggcctctgatttcatagaagggatctaccgaacagaaagggacaaagggacattgtatgagctcaccttcaaaggggaccacaaacatgaattcaaacggctcatcttatttcgaccattcggccccatcatgaaagtgaaaaatgaaaagctcaacatggccaacacgcttatcaatgttatcgtgcctctagcaaaaagggtggacaagttccggcagttcatgcagaatttcagggagatgtgcattgagcaggatgggagagtccatctcactgttgtttactttgggaaagaagaaataaatgaagtcaaaggaatacttgaaaacacttccaaagctgccaacttcaggaactttaccttcatccagctgaatggagaattttctcggggaaagggacttgatgttggagcccgcttctggaagggaagcaacgtccttctctttttctgtgatgtggacatctacttcacatctgaattcctcaatacgtgtaggctgaatacacagccagggaagaaggtattttatccagttcttttcagtcagtacaatcctggcataatatacggccaccatgatgcagtccctcccttggaacagcagctggtcataaagaaggaaactggattttggagagactttggatttgggatgacgtgtcagtatcggtcagacttcatcaatataggtgggtttgatctggacatcaaaggctggggcggagaggatgtgcacctttatcgcaagtatctccacagcaacctcatagtggtacggacgcctgtgcgaggactcttccacctctggcatgagaagcgctgcatggacgagctgacccccgagcagtacaagatgtgcatgcagtccaaggccatgaacgaggcatcccacggccagctgggcatgctggtgttcaggcacgagatagaggctcaccttcgcaaacagaaacagaagacaagtagcaaaaaaacatgaactcccagagaaggattgtgggagacactttttctttccttttgcaattactgaaagtggctgcaacagagaaaagacttccataaaggacgacaaaagaattggactgatgggtcagagatgagaaagcctccgatttctctctgttgggctttttacaacagaaatcaaaatctccgctttgcctgcaaaagtaacccagttgcaccctgtgaagtgtctgacaaaggcagaatgcttgtgagattataagcctaatggtgtggaggttttgatggtgtttacaatacactgagacctgttgttttgtgtgctcattgaaatattcatgatttaagagcagttttgtaaaaaattcattagcatgaaaggcaagcatatttctcctcatatgaatgagcctatcagcagggctctagtttctaggaatgctaaaatatcagaaggcaggagaggagataggcttattatgatactagtgagtacattaagtaaaataaaatggaccagaaaagaaaagaaaccataaatatcgtgtcatattttccccaagattaaccaaaaataatctgcttatctttttggttgtccttttaactgtctccgtttttttcttttatttaaaaatgcactttttttcccttgtgagttatagtctgcttatttaattaccactttgcaagccttacaagagagcacaagttggcctacatttttatattttttaagaagatactttgagatgcattatgagaactttcagttcaaagcatcaaattgatgccatatccaaggacatgccaaatgctgattctgtcaggcactgaatgtcaggcattgagacatagggaaggaatggtttgtactaatacagacgtacagatactttctctgaagagtattttcgaagaggagcaactgaacactggaggaaaagaaaatgacactttctgctttacagaaaaggaaactcattcagactggtgatatcgtgatgtacctaaaagtcagaaaccacattttctcctcagaagtagggaccgctttcttacctgtttaaataaaccaaagtataccgtgtgaaccaaacaatctcttttcaaaacagggtgctcctcctggcttctggcttccataagaagaaatggagaaaaatatatatatatatatatatattgtgaaagatcaatccatctgccagaatctagtgggatggaagtttttgctacatgttatccaccccaggccaggtggaagtaactgaattattttttaaattaagcagttctactcgatcaccaagatgcttctgaaaattgcattttattaccatttcaaactattttttaaaaataaatacagttaacatagagtggtttcttcattcatgtgaaaattattagccagcaccagatgcatgagctaattatctctttgagtccttgcttctgtttgctcacagtaagctcattgtttaaaagcttc

SEQ ID NO: 22608 - DNA, 2958 bp, Homo Sapiens
atgatccgacacgccggggcgcccgcgcgcggggaccccacgggtccggttccagttgttggcaaaggagaggaagaggaagaggaagatggcatgcggctttgtctgccagccaacccgaaaaactgccttcctcaccgccggggcatcagcatcctggagaagctcatcaaaacatgcccggtgtggctgcagctgagtctgggccaggcagaggtggccaggatcctgcaccgggtggtggctgggatgttcctggttcgccgggacagcagctcgaagcagctggtgctctgtgtccactttccttctctgaacgaaagctcggccgaggtgctcgaatacaccattaaggaagaaaagtcgatattgtacctggaaggctcggctcttgtgtttgaggacatcttcagattgattgcgttctactgtgtcagtagagacttactgcccttcacactgcggctaccccaggccatccttgaggccagcagcttcacggaccttgagaccatcgccaacctgggtctgggtttctgggactcctcgctgaatcctccacaagaaagagggaagccagcagagcccccaagagaccgggcccccggattccccctagtctccagcctcaggcccacagcccatgacgcaaactgtgcctgtgaaatcgagctgtcggtaggaaatgaccgcctgtggtttgtgaatcctattttcatcgaggactgcagcagcgccctgcccaccgaccagccacctcttggaaattgccctgcacgccctttgccgcccacctctgatgctacctcacccacctccaggtgggccccacgccgcccaccaccccctcccccagtgctgcccctgcagccctgcagcccagcccagccccctgtgctccctgctcttgcccccgcccctgcctgtcctttgcccacctctcccccagtgcctgccccccacgtcacaccccatgccccaggtcccccagaccatccgaaccagccgcccatgatgacctgcgagagactcccatgccccactgcaggcctgggccccctcagggaggaagcgatgaagccaggggcagcctccagtcccttgcagcaggtccccgccccgccactgcctgcgaagaagaaccttcccactgcccctcccagacgccgcgtttccgagagggtgtccttagaagaccaaagtccggggatggcggcagagggggaccagctcagcctgcctccccaagggacctcagacggccctgaggacacgccccgggagagcacggagcaaggccaggacacagaggtgaaagccagcgatcctcacagcatgccagagctgcccaggacagccaaacaacccccagtcccgccccccaggaaaaaacggatctctcgacaactggcctcgaccctcccagctcccttagagaacgctgagctctgcacacaggcgatggccttggagacacccacgccgggtccacccagagagggccaaagccctgcttctcaggctgggactcagcaccctcctgcccaggccactgcccattcccagagctctccagagttcaagggctccctggcctccctctcagacagcttgggggtgtctgtcatggccaccgaccaggactcctactccaccagcagcacggaggaggagctggagcagttcagcagccccagcgtgaagaagaagccctccatgatcctgggcaaggctcggcaccggctgagctttgccagtttcagcagcatgttccacgctttcctctccaacaaccgcaagctgtacaagaaggtggtggagctggcgcaggacaagggctcgtactttggcagcctggtgcaggactacaaggtgtacagcctggagatgatggcgcgccagacctccagcacggagatgctgcaggagattcgcaccatgatgacccagctcaagagctacctgctgcagagcaccgagctcaaggccctggtggaccccgccctgcactccgaggaggagctcgaagcaattgtagagtctgccttgtacaaatgtgtcctgaagcccctgaaggaagccatcaactcatgcctgcatcagatccacagcaaggatggttcgctgcagcagctcaaggagaaccagttagtgatcctggccaccaccaccactgacctaggtgtgaccaccagcgtgccggaggtgcccatgatggagaagatcctgcagaagttcaccagcatgcacaaggcctactcacctgagaagaagatctccatcctgctcaagacctgcaaactcatctacgactccatggccctcggcaacccagggaagccctatggggcggatgacttcctgcctgtgctcatgtatgtgctggcccgcagcaacctcacggagatgcttctcaatgtggagtacatgatggagctcatggaccccgccctgcagctgggggagggttcctactatctgaccaccacctacggggccctggagcacatcaagagctacgacaagatcacggtgacccggcagctgagtgtggaggtgcaggactccatccaccgctgggagcgccggcgtactctcaacaaggcccgggcctcccgctcctccgtacaggacttcatctgcgtgtcgtacctggagcccgagcagcaggcgcggacgctggcgtcgcgggcggacacccaggcccaggcgctgtgcgcgcagtgcgcggagaagttcgcggtggagcggccgcaggcgcaccggctgttcgtgctggtggacgggcgctgcttccagctggcggacgacgcgctgccgcactgcatcaagggctacctgctgcgcagcgagcccaagcgcgacttccactttgtctaccggcccctggacggtggtggcggcggcggcggcgggagcccgccctgcctggtggtgcgggagcccaacttcctgtga

SEQ ID NO: 22609 - DNA, 9302 bp, Homo Sapiens
agcaaatagactgaatgaaagatgagcttctgcctttatatccttctctcctgctacccaactcattgtggtgaaggaaaaagaaaacgcgggtggagactgcactatatgcttaggactgaaatgcaactgcagaagcaacatgtgaccttttagagatgcttgtgggactgcataaagtgaagagggaaactggaaaaaaacaatgaaattgaatagggaaaacctgctttctgcaaacaactgaaaaagctgcatttagaaactgtttctttggccctcatcgagaagctggaacttgtattgttaggccccttatgggacaagctctcaactgctgatcacccagtgattgtcaccatggccagcaagaggaaatccaccacaccatgcatgatcccagtgaagactgtggtgttgcaagatgccagcatggaggcccagcccgctgagaccttgcctgaaggaccccagcaggatctgcccccagaagcatctgctgccagcagtgaggcagcacagaaccccagcagtactgatggctctacactggccaatgggcatcggagcactttagatggctatttatattcctgtaaatactgcgatttcagatcccatgacatgacccaatttgtgggacatatgaactcagagcacacagactttaataaagacccaacctttgtatgcagtgggtgcagttttctggcaaaaacccctgaggggctttccttgcacaatgccacatgtcactccggggaagccagctttgtgtggaacgtggccaagccagacaatcatgtggttgtggagcagagcatccctgagagcaccagcactcctgacctagcgggtgagcccagtgctgaaggggctgatggacaggcagaaatcatcattaccaaaactccaatcatgaagataatgaaaggcaaagctgaagccaaaaaaattcatacactcaaggagaatgtccctagccagcctgtgggtgaggccttaccaaagctgtcgactggagaaatggaggtgagagagggggaccattccttcatcaatggggcagttccagtcagccaggcatctgccagctctgcaaaaaacccccatgccgccaacgggcccctgataggaacagtgccagttttgccagctggcatagcacagttcctctccctccagcagcagcccccagtgcatgcccaacaccatgtccaccagccactgcccacggccaaggcccttcccaaagtgatgatccccctgagcagcattccaacgtacaatgcagccatggactctaacagcttcctgaagaactccttccacaagttcccctaccccaccaaagccgagctctgctatttgactgtggtgaccaagtatccagaagaacagctcaagatctggttcacagcccaaaggctgaagcaggggatcagctggtcccctgaggagattgaggatgcccggaaaaagatgttcaatacagtcatccagtctgtgcctcagcccacaattacggttctaaataccccactcgtcgccagtgctggcaatgtccagcatctcatccaggccgctcttccaggtcacgttgtggggcagccagagggtacaggagggggacttctggtcactcagccattgatggccaatgggttgcaagcaacaagttcccctctccccctcacggtgacatccgtccccaagcagccaggtgtggcacccattaacactgtgtgttcaaatacaacgtcagctgtgaaggtggtcaatgcggcccagtcgctcctcacggcctgccccagcataacctcccaagccttccttgatgctagcatctacaaaaataagaaatctcatgaacagctgtcagctctgaaagggagcttctgtcggaaccagttcccagggcagagcgaagttgaacatctcacaaaagtgacgggcctcagtaccagagaggtgcggaaatggttcagtgatcgtagataccactgccggaacttgaagggctccagagcgatgatacctggagatcacagttccatcatcattgactctgtgccagaggtgtccttctccccatcgtccaaggtccctgaggtaacctgcattccgacaacagccacactagcaacccacccttctgccaaacgacaatcttggcaccagactcctgacttcacaccaaccaaatacaaggagagagcccctgagcagctcagagccctggagagcagttttgcacaaaaccctcttcctcttgatgaggaactggaccgcctgagaagtgaaaccaaaatgacccgacgagaaattgatagctggttttcagagagacggaaaaaagtgaatgctgaggagaccaagaaggctgaggagaatgcctctcaggaggaagaggaggctgctgaggatgagggtggagaagaggatttggccagtgagctaagggtctctggtgaaaatggctctctggaaatgcccagcagccatatcttggcagagcgcaaagtcagccccattaaaatcaacctgaagaacctgagggtcactgaagccaatggcaggaacgagattccagggctgggtgcctgtgaccctgaggatgatgagtcaaacaaactggcagagcagctcccaggcaaagtgagctgcaaaaagactgcccagcagcggcacttgctgcggcagctctttgtccagacacagtggccaagcaaccaggactatgactccatcatggcccagacgggtctgccacggccagaggtggtgcgctggtttggagatagcaggtacgcactgaagaacggccaactcaaatggtacgaagactataagcgaggcaacttcccaccagggctactggtcattgcccctggcaaccgggagctcctgcaggactattacatgacacacaagatgctgtatgaagaggacctgcagaacctctgtgacaagacccagatgagctcccagcaggtcaagcagtggtttgctgagaaaatgggggaggagaccagagccgtggcagacacaggcagtgaggaccagggccctggtactggtgagctcacagcagttcacaaagggatgggtgacacctattcagaggtgtctgagaacagtgagtcgtgggagccccgtgtccctgaggccagctcagagccctttgacacatcgagtccccaggctggacgtcagctcgaaacagactgaatttgatctgattaatgtgaaggactggccagtctgggaaaccgcctgccacgtggaagagccaaacccgactctctgctgccacatgccgttcccatgcccggctgctgggcacctgggagagcttccagaatcctcgcagacagcccagagcctgccgctaccctcggcctgcccaccaccaagcaagcagcaagcaagatggggttctcatcagttcttcctcccacaatgtaggacctttcctttaccttccaatggataaaatagttcagagttcatagtcatattcatagacacagaatcaagcttttaacatatacatccacctctatatgttaaataaaacatcagattatcaacactgtcattacgtagaaactttggttagccaagcagtgcattgtcagttacgtcatctctaaaaatgacctgtgtctgttctctggggattgctgggtcacaggtgcccctcaccttccacagtcaggcagggaagttataggcacaaagctacgtctggaacccctttgtgccccctttgtgttcctcaaggaagcagtacctttgaagagatctctgctgcattaagtgatgaccggctacgtttcatgtcaggcttgctttgccttgtgggctactcagtgcagaacctgctgtaaccctcagttcaaaaaatggactggcaatgtgattagcgttggatgctttaccattctctttagttgttaccgtaattctgctttttcatgggagtttgaatcatggaccataacttttcagttatcagatcaactaaagaaacatttgttgttaagcctaatgtgctgacctatgtgcctgcattttttttttaatctagacatgtttggagtgagagaaagatggaaaaaagacatggggtagggacgtaagtggaaatctatagccacagcctgaagctttgaccactgcggttttcagagccctttctccacactcatttcagagcctcctatggtttgggaaggaataacacactggcccattagtaagggtgaaggctggagggatttgttgacttcttggaattatcagaggtagggtggtctttagcacaaagacttgcatgcagagatccctggcagaacacccagagtgcccgtggctcccaccccagggtctggccggtgtgctggatgcatgcccaagggtgctgggcatcactggtccttgtgaggatgcttttaaagttttatatttatgtccccaaacttggaaacaagaactctactttagcctaaccctcatgtccttttttgaattgagaaaattacaggaaatggtgcctttgaaaattagaaaacttgcttacagagctgttctaaatggtaaatcctcaatttccccaagaccggttgctctgagagtagctggtaaagaggggcgaactaaagacctgtccacctgtagctccgctcatttcttagaaaccacctgcttcccagagtgccaagccacaagtaccaggcttcgtgggcacagacacctcctgggctgggcagagtgacagtgctagaagaccccagagagagggcaagggctttgggcaagaagcactggtggtgttttagggaccgtccttctcccctacccagggaactggacctggcagggcaccgtgctcatgtggctccaaggacaagcatggcggtggccccttctgccttccaggagaggtcttgcttttgaaactaaaatcatgttcttctaaagtgtcatcttctgccctccctgtcccaatagggaccacatcttatttgtctcaaacagggacttgtgagtacttggcaagttttgcagcctatttttgtattcttaatttggggagtaaagatgtttggtctcaaaaacctttgaggaattgccaagaatggcgagtgattgctttccttcagagaacagacacttggaatttctccttttagtgtttatatacgtgcagattaatttatatatatatatatacacacacacatatacagtataaatactcatttgattctcgtaaaacgcgcatctggcgtgtgcagttgagaaacttggtggcacatgggtgttgggggagtagcctgtgttggagggacaccagtgcactaggcagctggggcggcccaggctgaagccatctccgggtgtctgagaaaccacccagtgcctcacctccagatcctgctggcatcacctccagagccctgcatgcactggctgaagagttggtctgtggagaggattttcttggttacttgtattcacggttaatttacaacccaaacagcaaaacacagttggtggacaagttcatgcaggacctacagtgacccagccatgggcactagctcatctttcaggtggaaaagtacagtgctgcctgccctggtatgtttttcttatagatgttagccctgcccaacagccagggctacactacaaaaggcaagaatgcccatgtaaggagcccagcagtctggacagatccttcttcctctgctgttggatgagagtgagtgagtatggtctggaccttatccttgaaagatgatcaaaagcgatgatgagggaggcagtcatcacgcaggtgcttaaagggacattgtaggaggtactcaagggtttgggggcaaaaccctgaatccagccagtcgtgcacagagacacacccacactagcccagtggcagtgggggatgtgggatggcagcagccaggtatgtagccctgtcacaggacagctcactgtggttttgcacactgcctaagggttaaattgtgttgttgccttcagtagaaggcatttgtgggctgcagagttgagagttgggtgaggttagtctctcctgaagaaaaagcctataaaaagtggctaatcttatcccttttctctgtatgcagttggactcgtcagagatagtaaaatcatcttttagtgtttttttgttgctgatgtcttgtacccatttgttttttacatggggttgtagatcgagttctcaaaggtgaaaccagatgatcattctgataaaggaaatttaaatttgatacatatgctttgtatattttgattacttgttttcgtttttgactataaaggagctttttttcttgctcagagtttacctgggagatttcaccagtttgactcaccatttgcagatgtgcttttgtattaaatttaaattttcacatatcacatccattctcaaggtagttatatgctggagaagaaaaatcctctagacacatgaaggcccacatagtcaagtcttccagggcaaagccagcagcccacccaggtcaggtagccagcagggctcagttcccctcactccagacacggaccctcctcttcagggtctcttgacccagcttccttctctccttttacctgagagcacagacctctctcagccagcctgcccagaccacggggggctactcccatgtagtttggggagcacttgatctcagaaaagctccattgtctgagcaaatgggcagttgtggagctcaagcctttctcctgtgctcaagtcccttccccaagcaaggcttcaacctcatctacccaccatgtagttttctctggccatttaagtggggcggcagggacatggttgggccatgccacaccagggctggtgaggcaaccagttttgattttgacagagtggctggaggaaaagtggcaatcaaggtgctgcttggtttgctctgagtgcaaatggaaccaacaggtttctgctgcaatctgtgtgttcccagtgccaggtcacaccaggaggggtggggcagggctaaccaagtggtctctgaactcaccgagcgtctgcacttggttgtgaagttaatgggagtacagagagcgtctggccttggagaggggttgagagcctcctttttggttcttcattcctgagctcttgcctgcccacaaatctgacctctttgaatggggacgcagtccttcaacagagaagtttctatggcaaagaagtttctatttagctctagatccagcagagtcatccattctaactgccctgaagtctagagcaggggagggaacccagaggctggggatgagactaggcagaccctggttaccatatggacaaggacaggggaaagcacccccttcctcaatttctgaaagttctatctttgggttcgcaggactttgaggatgataaagaacatataggtactagcttgttgttgctggtccaaagcttccacagccctgagaatttggctttcgtggctgctctggcagctgagcgaagggaggaaggcagccgctctggtggggactctaggcaccttccctgctgtccacttggataggcggtgagccccagggtactgagaggagcctgagcatttacctgccattagtgcctcttccttcaggagactggcttgaaacgtgtgttcatgtgcgcgtgcacacacacacatgagcaactgtatgtgttaatgaatagtttttcttggttaatgctttttaacttctgttcctttccgtaagtggatgattcaaaattaacgtgacttggctgggcgcagtggctcacacctgtaatcccagcactttgggaggccaagggaggcggatcacctgaggtcaggagttcgagaccagcctgatcggcatggtgaaaccccgtttctactaaaaatacaaaaattagccgggcgtggtggtgcgcgcctgtaatcccagttactcaggaggctgaggaaggagaatcacttgaacccgggaggtggaggttgcagtgagctgagatcgtgccactgcactccagcctgggcgacagagcgaaactccgtctcaaaaaaaaaaaaaaaacttaatgtgactggagttaaaagtgaaatgtcaggttgtttagtcactgaatagagagctacaagtgcttggtctttcccaagaatcaaacctgagtagaaatacatttaaaagaaaaatctacatggtacctatgaatcctgtaatttgtttagggagatcttgtcactcatccctggttcctgcccatactgtttggtctcgttcttgcagtttgcttggaacagggccagagccccacatgagattgtcagcaggagtgaggagcgccagtccctactcctcagcagggacccagcacagcaatccggttgttctcggttagactgggtcggggccaggggagaagcagtcacccctgtgtagagggttcccgctgtgcttctgagcagttgctttgttcagaagtgttaggagggtcagattgtgccataattgttattaaagagaaaacacgcccaccttcctttctcccctgctggccattgttcattgagttttactgagggcagcctttgtggaagtcagggaggttgccaaaggcctgtagatgcctcctgacaaggtcttgattcctggttttctagcacccatttgcattttggtcttcagcacaaagccttgttccctgtggccggacttctgggcaataagactggggagtgactgttgagcagtctgctgtcaggagagatggctgaaaaggtgatcatcttggtgctaaacaagtaagaggcaactgccctgtttttgtttgttttgaggcacaatgaaactttagccaaactctgcaagagggtcccatctcctgccatggccaggtgtgagagaccaaaccgagaaaacagcatactctatcacttaagccttgggtagaatgggaattctttaccctgggtaaacgttttaacaaaaaaatggaacttaacttcggtttggactgtggtcgtgctgaggcaggagtggggttgccctcttggggctgaatctccaggcctcacgaggtcccctgtggggatgctgctatttctaagatgcaaattgcacatttcctagattttgtatctgtggatttggataagggaggggaacacggacaaattgcttgtacaatttgaaatgggcctcaatggtacttcaaaccttttgattattcctaaataaaaacataaatatatttc

SEQ ID NO: 22610 - DNA, 8213 bp, Homo Sapiens
ggcaaacacaattcttcctcattcacatagccatcatttacactgcttgccaaccctaatgaatatggctgcatcctttgatatccccaaggaaaagagactgcgagccagtgcagccttgaactgtttaaaacgcttccatgaaatgaagaaacgaggacctaagccttatagtcttcatttagaccacattattcagaaagcaattgcaacacaccagaaacgggatcagtatctccgagttcagaaagatatatttatccttaaggatacagaggaagctcttttaattaaccttagagatagccaagtccttcaacataaagagaatcttgaatggaattggaatcttatagggaccattcttaagtggccaaatgtaaatctaagaaactataaagatgaacagttacacaggtttgtacgaagactactttatttttacaagcccagcagtaaattatatgccaacctggatctggattttgccaaggccaaacagctcacggttgtaggttgccagtttacagaatttcttcttgaatctgaagaggatgggcaaggctacttagaagatctagtaaaggatattgttcagtggctcaatgcttcatctggaatgaaacccgaaagaagtcttcaaaataatggtttattgaccacccttagtcaacactactttttatttattggaacactttcttgccaccctcatggagttaaaatgctggaaaaatgcagtgtatttcagtgtctccttaatctttgctccttgaaaaaccaagatcacttgctaaaacttactgtttctagcttggactatagcagagatggattggctagagtcatcctttccaaaattttaactgcagctactgatgcctgcagactctatgcaacaaaacatttaagggtattattgagagctaatgttgaattctttaataattggggaattgagttgttagtgacccagctacatgataaaaacaaaacgatttcctctgaagctcttgatatcctcgatgaagcatgtgaagacaaggccaatcttcatgctctcattcagatgaaaccagcgttatcccaccttggagacaagggtttgcttctcctgctgagatttctctccattccaaaaggattttcctatctgaatgaaagaggttatgtagcaaaacaattggaaaagtggcacagggaatacaactccaaatatgttgacttgattgaggaacaactcaatgaagcacttactacttaccggaagcctgttgatggtgataactatgttcgtcggagtaaccaaagattacagcgtcctcacgtctacctgcctatacacctttatggacaactagtacaccataaaacaggctgccatttgttggaagtacagaatattattacagaactctgtcgtaatgttcgtacaccagatttggataagtgggaagaaattaaaaaactgaaagcatctctttgggccttgggaaatatcggctcatcaaattggggtctcaatttgctacaggaagaaaacgtgattccagatatactaaaacttgcaaaacagtgtgaagttctttccatcagagggacctgtgtatatgtacttgggctcatagctaaaaccaaacaaggctgtgatattctaaaatgtcacaactgggatgctgtgaggcatagtcgcaaacatctgtggccagtggttccagatgatgtggaacaactctgtaatgaactttcatctatcccaagcactctaagtttgaactcggagtcaaccagctctagacataatagtgaaagtgaatctgtgccatcgagtatgttcatattggaggatgaccggtttggcagcagctctactagtacatttttccttgatatcaatgaagatacagagccaacattttatgaccgatctggacccataaaggataaaaattcattccctttctttgcttctagtaaacttgtgaagaatcgtatcttaaattcgcttactttgcctaacaaaaaacatcgtagtagcagtgatccaaaaggagggaaattatcatctgaaagtaagacaagcaacaggcgaatcagaacacttacggagcccagtgttgattttaatcatagtgatgattttacacccatatccactgtacagaaaacattacaattagagacttcatttatggggaataagcacattgaagacactggtagtacaccaagcattggagaaaatgacttaaaattcaccaagaattttggtacagagaatcacagagaaaatacaagccgagagaggttagtagtagaaagttcaacgagctcacatatgaagatacgtagccaaagtttcaatacagacactacaacaagtggcataagttcaatgagctcaagtccttcacgagagacagtaggtgtagatgctacaactatggacacagactgtggaagcatgagtactgtggtaagtactaaaactattaagacaagccactatttgacgccacagtctaaccatctgtctctctccaaatcaaattcggtgtccctggtgcctccaggttcttctcatacgcttcctagaagagcacagtcccttaaagcaccctctattgctacaattaaaagtctagcagattgtaactttagttacacaagttctagagatgcttttggctatgctacactgaaaagactacagcaacaaagaatgcatccatccttatctcactctgaagctttggcatctccagcaaaagatgtgctatttactgataccatcaccatgaaggccaacagttttgagtccagattaacaccaagcaggttcatgaaagccttaagttatgcatcattagataaagaagatttattgagtcctattaatcaaaataccctgcaacgatcttcctcagtgcggtccatggtgtccagtgccacatatgggggttcagatgattacattggtcttgctctcccggtggatataaatgatatattccaggtaaaggatattccctattttcagacaaaaaacataccaccacatgatgatcgaggtgcaagagcatttgcccatgatgcaggaggtcttccatctggaactggaggtcttgtaaaaaattcttttcacttgctacgacagcagatgagtcttacggaaataatgaattcaatccattcagatgcctctctgtttttagaaagtacagaagacactggactacaggaacatacagatgataactgcctttattgtgtctgtattgaaattctgggtttccagcccagcaaccaactgagtgcaatatgtagtcattcagactttcaagatattccatattctgattggtgtgagcagactatccataatcctttagaagtggttccctctaagttttcggggatttctggatgcagtgatggggtgtctcaagaaggctcagctagcagcaccaaaagcacagaattgttactaggtgttaaaacaattccagatgatacaccaatgtgccgtatactccttcgcaaagaagttctaagattagtcattaatttgagtagttcagtttcaactaaatgtcatgagactgggcttttaacaattaaggagaagtatcctcaaacatttgatgacatatgcctttactctgaggtttcccatttgctgtcacactgcacattcagacttccgtgtcggaggttcatacaagaattatttcaagatgtacagtttctacaaatgcatgaagaagcagaggctgtgttggcaacaccaccaaagcaacctatagttgatacatctgctgaatcctgacctcatatttatgatggatatagatacatactatatatattcatatttgtggatttcctaaaagcctcagaaaatacgactgactaggcagcaaagacaggagtatcttctgtacactgttccgcagttactggtacatgaacagttggaactgctgactttcctaaccaaaacaacttccttctctcctttgttgagccttttgaggggttcatgattcattaccacagttttaagagtttcagttaccattgtatgcaagagccaagcactgaatacctacataggttttctattttctttcattttaaaagcgtaatgacagtggaacaataatgggatatgcagaagcacccttcacaagttatttctgaatgatttttagggtaaataatacagatgccttgtttgttaactaacttgtggaaagcaggaatcagtgtctctaaggctgcatcctattaccacaatggggtgtgctataactgctggtattagagagggaactttggccctttcacgtttttcttaatgtttgtaacactacttcagaggtttataacctcaaagcagaagaagagcctcaacaacccgggacttataagttattcttatgttactagacttgcataaagattcttgttttccaactcttcattttgttgcaatgtgttattacaggatatatgaaccaattaaggtttttcactacagttcttgaataaaatttaaaaatcattttttattttaattaaaaatatttcccatttatagaatgcatatatttgcaatggacttccactttcatcaactttccatctcatcgctttaaacaggaacttgaacaagcactgttagtttagacctaaaggataggaaagcattaaataatactttggatctcctgaggaaaagataagtttgcttgcaatttacacattccatggggaaagaagagccatatttccttaaaaaaaacattaataaagcttgttattgagaaaaattgtagtgaaaagccttaagtaccaaattttaaagcagcagtaacttaatttttatatcagtgtttttgttttgcacaaactaaatgcagtggtaggtgggtttatgagtatattaattgcctttatccatttgtgaagttaagttgatgagggcaaggtttttgtttgtttaatttgtatatgtctaaaggtatttggaactttttacaggaattaaacatatatgcaaatttgtatataaaaatagcatggccatcatttgaatgcttgtaaatgaaaggattatcttttttgagatctatatataaatagaaatagaaaatccagctggactgattaggattcttttttaattcatttgtgtataacatttttattacaattacacatcagttttgacacagtcatagcaacattaatattttcccatgatgcagatcctttttgtaatgggcttgttctttgagatctctgtaaagaaccctgtgaactagaaaacataactcacagagatacttttttaaaaaatttatttactggaactgaaagttccagttgggatgaagcatttcatctcacttcataacacctctttgactgcacttcagtgaattgttcttatgtgcactgtgtagcaacttacattataacaaagcagataagggctgtaagctgctgcttatgttgaaaagtggttcttcagattttctctcataaaatccagttgaagataaataatttttttatactttatcactgaacccaagtgtttatttaaatgtcaacagtacttctaagaacgttgcctgtcatcgtggtctttggtcttggataactaaactgcctttccagagaaccaaatgtcagagttactagaccaaatagtggttaaaacctccaaaggaagtaatgtaatcttattcataatgggattaacatattttagacattcattttaaacactacctcagttaatatagagtataaaaatctgtggtttaatccctcaaaagttaacagtaattttttttttgtcttacacacacacacaccccctcccccaccatcactatccctgtaccctcaccttggtcatctatcctgaaataaggcttagttagtattggcctgaatgttttgtgttttttttttgttttttttttttactgttactttgaaaaatatgtatgtataccttatcatatctgcctatatcacttactttggggagatactcagagctttgtggttatcagtatactaaaaaaaaaaaaaagtctacgcttaaatttatagtgctatttggtttctccatgatttcactgacaggtctaatacattttctttgagtacttgtttgtaaaaagtagactttatggtgaaaaatacatgcagtgccaagtgattaacttaagtgtttaaaaatattaaattatagcagaagaggttaggaatgatatcagcagtaatagaaataattgagaaaatcatctataaataatagatattacagactatagaataccaaaataatgtcaatactgtagtttttaaagattttaggattaatcttagtccatataaatttgtactattggtaattattgaataattgggaggaatctgggcagttgtgctggttgtaaactatgaatttctaatcgtaaagtgaattgttatttctaattgaactttttttcaagaacagatttcagcctcacatactaagtaaatactgataaataaggaaattagaaatttagtattcataattaaatatgctctaaaatttcctatacttttatttcctgtttattcttaggtagattggaagggggaaacagtctgttctccctaattaaattttttctaataacgattagtagaatatggacattctatatgacagtgacattaaaagaggctctttggaagtatatacattattaacataatgtgtacaagtccttttgaaatgacaactttaatgggtttcagctcttttatctagagcttgagataattcaagctgagtttttcagggcatatcacaacggcaaagtgttcagcagtgggatatcaatgcttatttacattttcctactgctatttatataaaatgttattccattcagaggatgccttttatccccacattaaagcacagatcattaagcaataaaaaccaaattgtctgtcattcaaattataactgcagttatttttgcatggtaagagtgaggtgctaattttgtgtgagatgaactttgtaaactactttgggaaatgttctttggaagtaaggttttttctcctttagtcttatgcttccacttttgtctcagattcacaatccattaaaacatggggaaaaaagaaaaggtaaaattgagagacttttgttagaggagctatttggaatgaaccaacatttcagattttccaaaatgtaagttaggaagtctccattgtctctgcattaacaaaatacactgttactatcttaatctcaagagtgtcattacagtgagaatctcatttaaaagcataccagtgaaattaatagcagtgcttatcaaagaacactgaaatctgtgagaatctttctaggagcattcttttcttcttttagttccaagttccagggtatttttcattcctagtaggtttatatgactcacagaatgtggacttttttcctgtttggagtatttttgtaatgtaagtatcggatagctgcaccacagcatgcataaattgcacattttgttttactttctttatagaatatttaatttcaaaaatataatttatgccaaaaaaagcatacctttcaattttgctacttggttgatttagcacaaaatgcaaagtcttggggcagagagggggagtgaaaaaaattttataggtaattgttacaaaaatacctgtcagaaaccctaaagctgcattgtaaaacaaatggtgtaaactagttttgaaaagtggtaaggaattgtgaaaaaaatctcagacttaatgctctctaaccacatgagtttcttcttttttatttagtaatacgctgctacatatttggaggttctggtgtttgtaggtcactgaacagacattgaaatctgatttatattgtataactgtaacatagaaagaaaaagtatttatattttttctgtaagaatatttcattgagttgtgtataatttaaataagatttgtccccaaatggttttgctcaccttgattttttttgttgtgattttcttgtttttgtataatgtgtatagtttatgtcaagggcattaaaagcctcctgaagcataatcttatcaaagggatacattgttaataaaatgtacttaaaattcttaaac

SEQ ID NO: 22611 - DNA, 8282 bp, Homo Sapiens
tgagaaaccagccattgtcttcatgtacaggtgcgaccctgctcaaggccagctcagtgtggatcagagcaaggctaggacagaccaggcagcagtcatggagaagggtagagcagagaatgcattactacaggactcagagaagaagaggagtcattcttctccatcacagattcctaaaaagattctcagtcacatgacccatgaagtaacagaggatttttctcctcgggatccaagaactgttgttgggaagcaagatggcaggggctgcacttcagtcacaacagcattgtccctacctgaactggaaagggaagatggaaaagaagacatttcagatcctatggacccgaacccttgtagtgcaacatacagcaacttagggcaatctagagcagccatgatacctcccaagcagccacgacagcccaagggagctgtggacgatgccatcgcctttggagggaaaacagaccaagaagcacccaatgcttcccaacctacaccacccccactgccaaagaagatgatcataagagccaatacagagccaatctccaaggacctccaaaaatccatggaaagtagtctttgtgtcatggctaatcccacctatgatatcgaccccaactgggatgccagcagtgctggttcttccatcagctatgaactcaaaggactggacattgagtcttatgactccttggaaaggcctttgcgcaaggagagacctgtcccctcagcagcaaacagcatttccagcttaaccactctcagtattaaggatagattttccaacagcatggaatccctctccagccggcgtgggccctcttgcagacagggccgaggcatccagaagccgcagagacaagcactttatcgaggacttgagaatcgggaggaagtagtgggtaaaatccgaagccttcatacagatgccttgaagaaactggctgttaaatgcgaagaccttttcatggctgggcagaaagaccagctccgttttggagtggacagctggtcagacttcaggctaaccagtgacaaaccatgttgtgaggcaggtgatgcggtttactatactgcttcatatgcaaaagatccacttaataactatgcagtcaagatctgtaagagcaaagctaaagaatctcagcagtattatcacagcttggctgtccggcagagtctggctgtccattttaacattcagcaggactgtggtcatttccttgctgaagtccctaaccgtctgcttccctgggaggatccagatgaccctgaaaaggatgaggatgacatggaagagactgaagaagacgccaaaggagaaacggatgggaaaaacccaaagccctgttctgaagcagcatcatcccagaaagagaatcagggagtcatgagcaagaagcagaggagccacgttgtggtcatcaccagggaggttccatgtcttactgtggctgattttgtgcgagactctctggcccagcatgggaaaagccctgatttgtatgagaggcaggtgtgtctgctgctcttacagctatgctctggtcttgagcacctcaaaccctaccatgtcactcactgcgatctacgcctagagaacctgctacttgtccactaccagcctggggggactgcccaaggctttgggcctgcagagcccagccccacctcatcttatcccactaggcttatagtgagcaacttctctcaggccaagcagaagagccatctggtggaccccgagatcctccgggaccagtctcgccttgccccagagatcataacagctacccagtataaaaagtgtgatgagttccagacaggcatcctcatctatgagatgctgcacctacccaacccctttgatgagaacccagagctgaaggagagggaatacacacgagcagacctgcctcgcatcccattccgctccccctactcccggggtctgcagcagctggccagctgcctcctgaatcccaacccttctgagcggatcctcatttcagacgccaaaggcatcctccagtgtctgctctggggcccccgcgaagatctcttccagactttcaccgcctgccctagcctagtacagaggaacaccctgctccaaaactggctagacatcaagcgaacactgctcatgatcaagtttgctgagaagtccctggacagggaaggtggaatcagccttgaggactggctttgtgctcagtatttggcttttgccactacagactccctcagttgtattgtgaaaattctgcagcaccgttaatgtgtacctggatgatgcttttactacatcttcaccttcttcatgtcacccatgcacttcccctccctagtgctcactccaaattcaaggaaagaagaaagacaaacctctatccctgtccgtgaacaagtgggtctattcagaaaggttatccactgccccagattgaatgagaagctgagtctgtcttaactttacagaaattcagctgcacaaacttgcagttgccttcccttgaaacaccttctatcctaatagtcccataaatgcaggtaaaaatgaaaatccatattcttgaagggacagcttctttggtatgaactcagccagtgagctgtgtccatttcctccataattctggatatcacctatctttttagcaccaagtatttattctcactagcagtagacagacttaaccagtctctaccacgacccagtagactctgacaacagactcttcctttaaggtgtcaacaactgacttactaggcaggactgccatccttagcatcagcccagttttggttaccagggactatatcttttgttccaggagagagtagaaagaaaaggagagatcccatccttgggtcatagacccattttcattgccattatctgtaagtatgtgcactgcatggaggacagccctaatagtctcccctctgctgccactgcctgattctccactctgtccccacttgccagtgaagtttggatttatcagccacttgtggcccattacagagctgacccaaggtggtgtcaccaatgcctcagcagggtggagtgcagttcagagcttataaatagctggcagggcatgaggagatgattttcttgcatgtgcaattctctaggggccatcaggaaacagagtttaaagtaccctttgattactgtcagaactgtcagcatttgcagttttccccgagcagtaattggccagctcccttctatcagtagccagtgttaactagtttaccaaatgctgtaaacaattgccctgaatgaaatagctgtcagtggagctctaagatctcctttagagggcacagtgaggtgggctgttgggatggccgtaggcaggggagaggaagaaggccactgatgagactgctgacctcctcagaatgttgacctcttctagagagactgcctcccagtgtttaagtggctcattgctccttctgactctgtaaaatggctctggaggacagctcacaggaattctgattgctgaggtgggtgattgagagctgttcaccatgtgtgcagcctgtgctccccttctatggatatgtgtgcaatttttgtatgtatttttttagctgtatattacagtgtttatgttgcaacttcacctgaagcgagtctacagaaaccctcccccttcttcccttggcacatatttgcgctaagagatgagcgttccttccactggggttgtgtgtgtgtgtgtgtgtgtgtgtgtgtgtgtgtgtgtatgtatacacatgttcacctgtgcttgttttattcaaaactgtgagtatgtgtttactttgaccttgaaatcccaagagtcactcgaacaatgtgtgtgtacacttgtgtgcccatgtgtgcgtgcacacgcatgctggaagtagaggccaggcctctagaaaagcaacctgtggcagggttgacagacatgttctctgtgcctagtgagtgagtgagccctgaggcccctcatctaccagtgcagagtttccttaaagccaagactgactgtgcagtattacttacatagcacattagtggccttggaaatttctaaacttttaacatttttaacagcttttcatgtgattcatgtatatcaaagaggatcaggaaaggaaaataatgtattttattgtgctcttattacttttttaagtgattgtaatatgtgaggctctatttggagaatgtcccttatcccctggccagcaatataggactcacaggaaagaaggctggttagcccacaaagagtcttgcctcctctagccagagtgcagggctctgctcctaggaatggccatggagtgggcatgctgctgcaggccagcagtctgctcttggtgtcctgtggcatggccgcgccttgccttgaaggttggtgtttggttcatcttagcatagaacatgtgcacataactccttgcctgattatgcactgaagggcagcacacagaccactgaccatgtcagccagcacattcccttaacctcccccacctcccatcttgcaatgtcttgcatattgagatataccttctcaatgtcatgttcgtggtgccttgcccatgtaaatttgaatgttgactatttaatgaggttacatatttaatgctgaatgtttcctggtccctctatttgttatgtctctacttatctttttttttctttctctttttctgttatgatttggatccagtcttcactttaactctatggtataataagcatggacacctccactaccattatcttacagcactggtaaaccaagcacctcttcatatcagatgtttttagtactgtttttatattcagatttgttaagggcaaaagatgaatgcaaactagccagagaaaagcctcaggcttcccagagacaggtggctagattaatttttctctgggtgatggccaaagaatgtgagatagagagggaagggggtgttacaggttagagcagaatagagaaagaaactatatttctaagcaaaaagtactacatgagttggtcttcagaatatttttccaaaaaaatgaaattcagtcagtttaacattatcacaaatatttttcattttaattgtggtaggacctttgaatttgttcatcaactggaaagaaatcctaccctctgtagacacatacacacacatttatatatctatgtgtttgaattgtgactagtatagcactttacattttctcaagtaacaggaagttattgccttcaatattgattggaaattgttttctattgaagtctatactgtagagttttccatttatattgagagtttgaacaattaagctcctattggaacttttccttaagccacatgagcatgaacaatctctgtgacacttgggtgctagagaaacacaacagtggctaaagtagccaagagcaagactgaatgtatagcagagtgccttgttagagtggtaacctagtcttggaagcaattcagtggatgtttcataaagaggactagaacttcaagaagcctcctgtgctggctgaggtgagcccttttggtatatgtacactactgggttgcctagaagccaattcatgaagaataacagcaggatgagaaaaagagtcactgtaacctgtggaacaacaacgtaagaatcaccaacccctaggctgagctagaactggaagccaggaatatggcaatgagtttcaagatttgccctcagaagatgaactgggtgaggtatgggttgaggtgagggcacaagcactcatcctacctaccctgctgctgttgaggagctagaagtaaaacatattggttaggattttaacagttggagtagcctcccattatcagattaagtgggggtcacttttgcttccaaactcagaataagtttgtaaacatgggaaagtctaagccaagagatctaaagctctagaaatattaatgacatttctgggagtaaaactactaaaaattatatcttaaaagtttctagtagtataaagttcccaggccaggcgcagtggctcacgcctgtaatcccaacactttaggagggcgaggtgggcagatcacctgaggtcaggagtttgagaccagcctggccaacatggtgaaactccatctctactaaaaatacaaaaattagccgggcatgatggcaggcacctgtaatctaagctactcgggaggctgaggcaagagaatctcttgaacccaggaggcaaaggttgcagtgagccaagatcacgccatcgcactccagcctgggagattgagcaacttcgtctcaaaaaaaagtttccaggaaagatctttgggtcctactaagcgtctcaattttgagttatgaatactttggttcagggaagtaacctgacatttggttttgctggaattagggttttcgctagatttgactgcaattaggatttcttctagattttaccagcagtgatctgaaaaagtacaggctagtcacagaaatagagatggatttaggatactacactatatttcaaatgattctagatgtgtaaatatagtatgaacattcttggagaggggtgagacaaactggacttgctgggccaaccctggcatgtttttcattctcctcactagttgacaaggattgaaaattccgctccagcctaatgagtgaacaggatggctgcccacaaaaccaagttattagctttatgtcatcgaagctcatattctcaaaggcccaaagtgctgtgccgagacaaatccaagtgctgctcttgctgaagtgcgcactgaagtccagctgtccgtgcttacagcagtgccaaaagtggggattccatggaccaaaaacggtgccataagggaagccagaagagttgcagtgcaagatcctgggagagattataccaaagaaatcaagcctttttatcctgatgcttctaagatgatgagggtgagctgtgacagatgctgtgggaggggagttcacatacattccatgtcaaggcatttagctgataaatccatcctcagaaaagcacctttttaaaaagaagtccattttgtatattagaagatgatgatgatgatgaagatgaagaaagccctggcagatacaaagttcctcagtatttaaggagaaggatctcttccatgtccccttgacatgactgtggctattgcccaaacctcagcttgagaacatcatataatactgagagcggaagatttttttaaagagatatggtagtttaaataggtttgtttaaagaactcttgggaaatttcttaacaaattgtaattgtttttataaaccttcctacagagttgtgtaccattcatcatcaccatcatttaatatctgtaagtgcccagaaggtacaaggtgctatacagccgttaaacaccccctccctgcaactgtttaaaattagaatagatttttgcatcaaccactgctagaagctttccccacctaggtgggctgcaagggcctgcattcccaacatcccattacatgtttcccactccagaaagtctctgggtttattccagctttttatcttgacgtgtcccattcacccccatggtttggtttggtttggttttgttttttaaatcaagaaagtttcagggaatcaaaagaggtcggacattttttaacctagcagaagtacagagtcatatattttgctacgaatattgttgtagtacagaaaacccactttgcccgttagtgtgtggatagtatgtgtgtgtccgcactcatgataacttgaatgttgaaccagacatagggttcatttttgaaaggttaaaccacactgtttcaggaacttgctccaaatactacttggttatcccttcctttaccagttagaactaaagagtgtgatgtatgaacacactgggttgggattttctgttgaggatatgcagggcattttggcatgaggcaaatacagaagcaagatttcattctacttggtgatttgaatcatgacagtcctcattccaatctctctttaattctctctggccctgcccacactctgtatttgaaaatcttgtttttgctctttccggagcttcacccctctacttacatattgtaaagttgtataaatctatcattgaaaggtcccctctgccagcagtggtgccaccctttggtttgctgtggtactttgctgtgtactccgtggcatcatgttactgtgtaaataaattcattttaatacacact

SEQ ID NO: 22612 - DNA, 4008 bp, Homo Sapiens
atggagtccgaaatgctgcaatcgcctcttctgggcctgggggaggaagatgaggctgatcttacagactggaacctacctttggcttttatgaaaaagaggcactgtgagaaaattgaaggctccaaatccttagctcagagctggaggatgaaggatcggatgaagacagtcagtgttgccttagttttgtgcctgaatgttggtgtggaccctcccgatgtggtgaagaccacgccctgtgcacgcttggaatgctggatcgatcctctgtcgatgggtcctcagaaagctctggaaaccatcggtgcaaatttacagaagcagtacgagaactggcagccaagggcccggtacaagcagagccttgacccaactgtggatgaagtcaagaagctctgcacgtccttacgtcgcaacgccaaggaggagcgagtcctctttcactacaatggccacggggtgccccggcccacagtcaacggggaggtctgggtcttcaacaagaactacacgcagtacatccctctgtccatatatgacctgcagacgtggatgggcagcccgtcgatcttcgtctacgactgctccaatgctggcttgatcgtcaagtccttcaagcagttcgcactacagcgggagcaggagctggaggtagctgcaatcaacccaaatcaccctcttgctcagatgcctttgcctccgtcgatgaaaaactgcatccagctggcagcctgcgaggccaccgagctgctgcccatgatccccgacctcccggctgacctattcacctcctgcctcaccacccccatcaagatcgccctgcgctggttttgcatgcagaaatgtgtcagtctggtgcctggcgtcacactggatttgatagaaaagatccctggccgcctgaacgacaggaggacgcccctgggtgaactgaactggatcttcacagccatcacagacaccatcgcgtggaacgtgctcccccgggatctcttccaaaagctcttcagacaggacttgctggtggctagtctgtttcgaaattttttattggcggaaaggattatgaggtcgtataactgcactcccgtcagcagcccgcgtctgccgcccacgtacatgcacgccatgtggcaagcctgggacctggctgttgacatctgtctgtctcagctgccgacgatcatcgaggaaggcactgcgtttcggcacagcccgttcttcgccgagcagctgaccgcattccaggtgtggctcaccatgggcgtggagaaccgaaacccacccgaacagctgcccatcgtcctgcaggtgctgttaagccaagtgcaccggctgagagcattggacttgcttggaagatttttggacctgggtccctgggcagtgagcctggccttgtctgtcggcatcttcccctacgtgctgaagctgctccagagctcggcccgagagctgcggccacttctcgttttcatctgggccaagatcctcgcagtggacagctcgtgccaggcggacctcgtgaaggacaacggccacaagtacttcctgtcggtcctggcggacccctacatgccagctgaacaccggaccatgacggctttcattctcgccgtgatcgtcaacagctatcacacggggcaggaagcctgccttcagggaaacctcattgccatctgcctggagcagctcaacgacccgcaccccttgctgcgccagtgggtggccatctgcctcggcaggatctggcagaacttcgactcggcgaggtggtgcggcgtgagggacagcgctcatgagaagctctacagcctcctctccgaccccattcccgaggtccgctgcgcagcggtcttcgcccttggcacgttcgtgggcaactctgcagagaggacggaccactccaccaccatcgaccacaacgtggccatgatgctggcccagctggtcagcgacgggagccccatggtccggaaggagctggtggtggctctgagtcatcttgtggttcagtatgaaagcaatttctgcaccgtggccctgcagttcatagaagaggaaaagaactacgccttgccttctccagcaaccacagagggagggagtttgaccccagtgcgagacagcccgtgcacccccagacttcgttctgtgagctcctatggaaacatccgtgctgtcgccacagccaggagcctcaacaaatctttgcagaacctgagtttgacagaggaatctggtggcgcggtggcgttctcccccggaaacctcagcaccagcagcagcgccagcagcaccctgggcagccccgagaatgaggagcatatcctgtccttcgagaccatcgacaagatgcgccgcgccagctcctactcctccctcaactccctcatcggagtttcctttaacagtgtttacactcagatttggagagtcctgctgcacctggctgctgacccctatccagaggtctcggacgtggccatgaaagtactcaacagcatcgcctacaaggccaccgtgaacgcccggccgcagcgcgtcctggacacctcctccctcacgcagtcggcccccgccagccccaccaacaagggcgtgcacatccaccaggcggggggctcccctccggcgtccagcaccagcagctccagcctgaccaacgatgtggccaagcagccggtcagccgagacttgccttctggccggccgggcaccacaggccccgctggggcgcagtacacccctcactcccaccagttcccccggacacggaagatgttcgacaagggcccagagcagactgcggacgacgcggacgatgctgctggacacaaaagtttcatctccgccacggtgcagacggggttctgcgactggagcgcccgctattttgcccagcccgtcatgaagatcccagaagagcacgacctggagagtcagatccgcaaggagcgggagtggcggttcctgcgaaacagccgtgtcaggaggcaggcccagcaagtcattcagaagggcattacgagattggacgaccaaatatttctgaacaggaaccccggcgtcccctctgtggtgaaattccaccccttcacgccgtgcatcgctgtagccgacaaggacagcatctgcttttgggactgggagaaaggggagaagctggattatttccacaatgggaaccctcggtacacgagggtcactgccatggagtatctgaatggccaggactgctcgcttctgctgacggccacagacgatggtgccatcagggtctggaagaattttgctgatttggaaaagaacccagagatggtgaccgcgtggcaggggctctcggacatgctgccaacgacgcgaggagctgggatggtggtggactgggagcaggagaccggcctcctcatgagctcaggagacgtgcggatcgtccggatctgggacacagaccgtgagatgaaggtgcaggacatccctacgggcgcagacagctgtgtgacgagtctgtcctgtgattcccaccgctcactcatcgtggctggcctcggtgacggctccatccgcgtctacgacagaaggatggcactcagcgaatgccgcgtcatgacgtaccgggagcacacagcctgggtggtgaaggcctccctgcagaagcgtcccgacggccacatcgtgagtgtgagcgtcaatggagatgtgcgcatctttgatccccggatgcctgagtcggtaaatgtgcttcagatcgtgaaggggctgacggccctggacatccacccccaggcggacctgatcgcatgtggctccgtcaatcagttcaccgccatctacaacagcagcggagagctcatcaacaacatcaagtactacgacggcttcatgggccagcgggtcggcgccatcagctgcctggccttccacccgcactggcctcacctggccgtgggaagcaacgactactacatctccgtgtactcggtggagaagcgtgtcagatag

SEQ ID NO: 22613 - DNA, 7030 bp, Homo Sapiens
gggaaaagcagcgcagggcagagcaggcagggagggcggccggagcccggacacgggagcctcccagtcagttcaagacccgacatgagggaaaagggacgtaggaagaagggcaggacctgggcggaggccgccaagacggtcttagaaaaataccccaatacacccatgagtcataaagaaattcttcaagttatccagagagaaggactaaaagaaatcagaagtgggacttctcctcttgcatgcctgaatgcaatgcttcacacaaactccagaggtgaagagggcatcttctataaggttccaggtagaatgggagtatatactttgaagaaagatgtgccggatggggtgaaagagctgtcagaaggttcagaagaaagcagtgatggtcagtcagattcccagagttctgagaacagcagcagcagcagtgatggtggcagcaacaaggagggaaaaaagagcaggtggaaaaggaaagtatcgtcgtcctccccgcagtcaggctgcccatcacccaccattccagcaggtaaagtcatttctccatcacagaagcacagcaagaaggcactaaagcaggcgctaaagcagcaacagcagaagaagcagcagcagcaatgcaggccaagcatatccatctcctccaaccagcatctctcactaaagactgtcaaagcagccagtgactctgtacctgccaaacctgcaacatgggaaggaaagcaatctgatggacagacaggcagccctcaaaactcaaactccagcttttcttcctcagttaaagtggaaaatactttactaggcttggggaagaagtcattccagagatctgagagactccataccagacaaatgaaaagaactaaatgtgctgacattgacgttgagacaccggactccattctggttaatacaaatctgcgagcactgatcaacaagcacacattttcagtccttcctggagattgccagcaacgactgcttttactactcccagaggtagatcgacaggttggtccagatggtttaatgaagttaaatggctcagcccttaacaatgaattcttcacttcagcagcccaaggctggaaggaaagactctcagaaggtgagtttacacctgagatgcaggtgagaattcgacaagagattgagaaggagaaaaaagtggagccatggaaagaacaattctttgaaagctactatgggcagagttctggcctgagccttgaagattctaagaaattgacagcttctcccagtgatcccaaagtaaagaaaaccccagctgaacaaccaaaatccatgcctgtgtcagaggcctctcttatcagaatagttccagtagtctcccagtcagagtgtaaagaagaagcattgcaaatgtcatcaccaggcagaaaagaagagtgtgaaagccaaggtgaagtgcagccgaacttctccacatcttcagagcccctgctttcctcagctctcaatacacatgagcttagcagcattcttcccatcaagtgcccaaaggatgaggatctcttggagcagaagccagtcacctctgctgaacaggaatctgagaagaaccatctcaccacagcttctaattataacaaaagtgaaagccaagaatctttagttacatcgccaagcaaacccaagagtcctggggttgaaaaaccaatagtgaagcccacagcaggagcgggtccacaggagactaatatgaaagaacctctagcaactcttgttgatcagagcccagaaagcctcaagaggaagtcttccctcacccaagaagaggcccctgtgagctgggagaagaggccacgtgtcactgagaatcgccagcaccagcagccatttcaggtctcaccacagccctttctcaatagaggggacagaatccaggtgcgaaaagtaccacctctcaagatcccggtctccagaatctcccccatgccgtttcatccatcgcaggtctctcccagggctcgttttccagtctccatcactagtcctaacagaacaggagccagaactcttgcagacatcaaagcaaaagcccaactggtcaaagcacagagggcagcagctgccgctgccgccgcagctgctgcagccgcctcagttggagggaccattccaggacctggcccagggggtggacaaggtccaggagagggtggtgaagggcagactgctagaggaggcagtccaggctcagacagagtcagtgaaactggaaagggccccacactggaactggcaggaactggaagcaggggaggtacgagagagcttttaccctgtggtccagagactcagccccagtctgagaccaagaccaccccaagccaggcacagcctcatagtgtctctggagcacaactacagcaaacccccccagtgcctccaacacctgccgtcagtggagcatgcacaagtgtcccatcaccagcccacatagagaaattggataatgaaaaactgaaccccaccagagcaacagccacagtggcctctgtcagccatccacaagggcccagtagttgcagacaggagaaagcaccttctccaacaggtcctgctctaatctcaggtgcctcacctgttcattgtgcagctgatggcacagttgagctcaaagcaggtcctagtaagaatatacctaacccttcagcctcatcaaagacagatgctagtgtgccagtggctgtaactccctcccctttaacatctttattgaccacagccactttagaaaagcttcctgtaccccaggtcagtgcaactacagcacctgctggatcagctccaccctcgagcactttgccagcagcttctagccttaaaaccccaggaacttctttaaacatgaatggacccactttaagaccaacctctagtatccctgctaataatcctttagtgactcagctgcttcaaggcaaagatgttcccatggagcaaattctgcctaaacctctcaccaaagttgaaatgaaaacggttccactgactgcaaaagaggaaagggggatgggagcgctcatagctaccaacacaacagaaaatagcaccagagaggaagttaatgagagacagtcccatccagctacgcagcagcagctgggcaaaaccttgcaaagtaagcagctcccccaggttccaaggccccttcagctcttttcagctaaggagctgagggactccagcattgacacacaccaataccacgaaggactaagtaaagcaacccaagatcagatccttcagactctcattcagagggttcggaggcagaatcttctctcagttgtgccgccctcacagttcaacttcgctcactcaggtttccagctggaagacatctccacaagccagaggttcatgctgggttttgctggcagaaggacatccaaacctgcaatggcagggcactacttactgaatatttctacctacggccggggctcagagagctttaggaggacccattctgtaaaccctgaagatcgtttttgtctaagcagccccactgaagccttgaaaatgggatatacagactgtaaaaatgcaacaggagagagtagcagcagcaaagaagatgacactgatgaggaaagtactggtgatgagcaggaatctgtcacagtgaaagaggagccccaggtttcccagagtgctggcaagggtgacacaagttcaggacctcacagcagggaaactctatctaccagtgattgcttagctagcaagaatgtgaaggctgagataccattgaatgagcaaaccactttaagtaaggagaattacctgttcactagaggccaaacatttgatgaaaagaccctagccagagatttaattcaggcagcacagaagcagatggctcatgcagtgagaggtaaggcaatccgtagcagccccgagcttttcagttctactgttcttcctctgcctgcagacagccccacccaccagcccctactccttccacccctgcaaaccccgaagttgtatggaagccccacccagatagggccaagctatagaggcatgatcaatgtctccacctcatctgacatggaccataactctgctgtaccaggtagccaggtatctagcaatgtaggtgatgtcatgtcattttcagtgactgtcactaccatccctgctagccaagctatgaatcccagcagccatggccagaccattcctgttcaggcgttctccgaagagaacagcatagagggcacgccttcgaaatgttactgccgcttgaaagccatgatcatgtgcaaaggctgtggcgctttctgccatgatgattgcatcggcccctccaaactgtgcgtctcctgccttgtcgttcggtaatgagactagaaagagatacactgtaaaggagggggaagggaagggttgaccagttgggttttttgcgtccttttggaatcacagaaataaacaagtaggtttcagttgtcttcagagacaaatgttacttaatcaggaatacaaagtacagattttttacattttagaggaagagcaccttgtatagtaagtctaagtcaagcaagactttgtgaatttgtgacaagtttgcacttacaaaatcatgtaaatatgtcacattttgtttaacattatttttccaagtgtttaggtaataatgtattactttgaattcagattaatgttctactacttgtgactgagaaaagtttaatgccggcatggtaaaaggaagctgtctcccttctgacatttcctaggaagctaggaaaaggaaagtgaaggaatggtctaaagaaatgaccattcacactgattttgtctggacagtctggccgcaggttattcatagattattcagcctttgcaggacttggattcagggttttactcagtccctttaccttaggtggaatcttcttaaattgaaatttttggtaaggaattcatttcacaggtagtgtttcagactctgaaagccctgacttggttcttggcttctactgtactagttactagttactggtactgttgccaagcaatctgcttggaatttgtggatccctgctgttccctaatcccaccccctgccctgagacagtgaatgtagtccgtgaagggagtgcctctctgggaccccctgtgttgttacaggctgtgcagtgcaacaattccagcaaaaataccctatccccgcacttagtcattcgtggtaactaacaattttgaaatactcatataaaatgaacaggaaagtgttagtgattgggtgatttgagctacatcttgttgagcaaggggagtgaaaccacagaaactgttaaattgaacgtaaataactttggaaaacagttttgacactagaacaaggtcgcttctcttttcctcttctctcccaacctgttaacctagtgctagatagtcagctgctgttgcaggtagaaaagctcaccaatgccacatttgttcattctgttcaacctgttttgacctcccaggcatctgaacaggatgacatcatcttattatatcttactttacacatacgtgtatgtacacacacacacacaatacaagacatttttcctgttttagaaaatatagcccttgtttggattactgctgtctgagcactagaaatttctaatggaaagaggcctctgaatggctaagggaacatctggaaaggaaggaaaatgagccctaaaggttttttggttgcttgtttttgtttctttttctttcttgtttccttttttgtttttaaatccttctctagtgactgaagaaattgtgagtacataatatttaggtcatggttaaggaacattaaaataaacctgcagtttaacagaattttgtattaaatgggggagtgtcaatttgcatcatttgcatattgatttcaagtctcctaatttggaatgggtaaagtacaaatgttaatgcaacatagtacagttgtatttgtccttcatattcaggatgtgatatttacaaaatgcagaacagtttaaacttgttaagtcacattccagattaggagaaaatgggcaataatcatctctgttttgcccccattctactacccaccactgcccaccccacccccacatcacacactcttcgatgctttcccacagcccctgctccgctcctctccgtaagaaactcacttcactgtttttcacttttcacttctggcttttttgtggcccaaggccaatataggattaatatctgtgttccagcttcagccagaacgatatgtctgtccatctttctcctttcttccagcacacacagctaagagataagaaggctgcaaggattggggataaggagtatattttcaagccaagaaccagtagaaaacagaaataatggtgctcccaaatattcagtaccttgggcaatccaggaagggtttaaagagacctgttgctgcatagaactctccctgccctaccccttaactccaccttagtgccagggccgagggctggtctgcatgctggaagaggttgagagttttggaattgattccatgctaaatgtcagttaccagtttggattgatgaaagtgatttttctgctttacctttttcctgtcagaaaggttttcctctgtgctacccttaacttagggatgaacagactataactaggaaaggaggaaaggtatcagggatttttaagtccgtttagagagcaaaccatattgtgcctcttcatcttgacccaggctcttatagataggtcctaaacattgctgttcactagattatcttaacaaataatactcagctaaatatttgcatttaggaatactcctaaaacagatattgccaactagatacactgcctcaatcttgaccagacaagagaacagttaagttctctcagttgggtagtaacttgaataccagtctatttatcagttggtttcaacacagaggtttcaagtggaaagccattcatcttaaaagctgaacag

SEQ ID NO: 22614 - DNA, 19041 bp, Homo Sapiens
ctcctaccctgactccctttattacacaactctctttcaccctcttttcttccctgtcttcttcccagcacttttgacaggtttaactttacatgctatttgtgattatgagaaacctgtcttccctgtacattttaaatccattggctttggctgtcagttatctctagtgcttggtatattgcctggcccacaggcattctgcaaattgctgctgaaagactccttcatcattaccactccataaacacaaactctgcaaagtaaaatatttaaaaataactccacggacacctggcctttcctttttcttacaaaactttgcccttgaacataaggcagcttgttctggttgatgcctacaggctaatggaacctccattggtttttttcagcctggaagaaccttaagctttgtcattccccatcactagtgtgtatgaactaaagaataagctgactccaccaggtgagaacagcttcatctgcaactccagagatgactagaacacagggattaaataaaatgctggtttccactgcatttattactaatataaaaaaagttaaaaagaaaaaaaaaaaaaaacctcattctcagttctccaacagctctcacccctccctcttgccaatacaactcctgacccatttcctcagggccagttcaaaactgaacctgttcactgctgttttcacagaaaacaaccagtgccagggatgtaggggaagaggattggaagagggcaacagtactgtccagcttctacccaaagataggcaaggtggagattcacagaattcaaatgaatggactggtggcctcacaatgacatagtctaattaaaatgggctggaagggatctaggtaggataaagccattggaggctttataagacatgtcatgggtctgtgtcagactcagaataaccaacaggagaagaatggggagggccagggaggcagtctgatggaaagttcacaattctcccatgttgggaagtgggaaagtccagagggcaccaagcgcctcactcattttggcaggaaaacttattctagtgctgggaagtcacaaaaatgccacggacactgagaaaggctacaaggggatgcacagtttcacaaagcacggtgatcatagatagaccatagcggtggggatcatgctactgacagagaaactatgaaatccaaaggcagggagagtggccttttaggaagtaactctgcaccagtcacccaaacttgaccccaggttagacaacctggctgagtttcacaagcagctgacaacattgggggtagggaatgtcacataaaaaggacttaaaacaagcagctaaaagaagggaatggtaggaaaccgctccagggctctcaggaattgagggcaatactggggaacaggtggacagatgcacaagaaacagcaccaaagaggtttcctgttcagcagtcatttgatgacgggaaagaagatccaggaggcaactgaaaggaagcaaagatgggtcccgaaggcgagtctctacaggctggatcagaagaaagcgcgtatgccgcgcaccagtgatgcaacaccactctggaccccacacgggggaagtggtggatgggatgggtgtgtcactgactgagggtgttagaagagcctcacagtagccatcatagggctacagagaaataaatggccgctaggtcacagagagctccttccagcctggatgggaaggcacagtctcacagaggaggtccattgacgcctgggtggtagaaggcacagaggtcctcatatcgacagtggccctttttggcaaaatgtcggcagacagggcggtcggatttgtctgtgaacaagtgaaaatggaacagttaaaaatttgagcaacaaagaaaacaaatacaatgaaacgcagagacagaaggagaactgattttctaccccctaccatttccaggtattttggaatggtagtctttctcctgggagaaataacattgaggtctacttctgcttcaaaagcaaaaaggaaagcccagagaagattgtgaatgatcttctgaaaattaggtcactctgggagtaatgggcataacaaaatggacctcaccttccataacctgggggtcatccttgggcgggcaggtattcttgataagagaccagcttttgagccttcgagggtttctctgttccttgtgaaagcttcccctggtgggacccccatggcctggccccggaaaaggaggttctgcattgactccccaccaaccacgaccatatgggctagacctggggccaagccctctccgaattgggcctctaccccaaggaggaggtgggagactcagcagtggtggaatcagtggtccccttgatcctggaggacctctgtgaagagctggagagagagagagagagagacacagaaaggtgtctaatgggcagctgaatcctgataaaccgtgattaaaaaaattttttttattgaagaacagcatacataaagacacaccagttttaagtgcacaacccagttctcacaaagtagacacacttgagtttccaccaccaggtgaagagataaagccttattagcacctcaaaagatcctccccttgtgccccttttcccattacccaccctcctccccaaaggtaaccactatcctgacaccataggttagtttttgcctgtttttgaacttcacaaaaatggaatcatacagtctgcattcttttatgtctggctcctttcgctcaacatcatgtttgtgagattcatccaggttgcctgtagcagcagttcattcattttcgttgcagtgtagtcccattgcatgcatacacaacaatttatttatccattctactgatgatggacatgtgggtggtatccagtttggggctataacgagaaatgccactataaacatttttatacatgttgttacacatacgtatgcatttctgttgaatatatacgtagtagaggtattactggcttataaagtatatgttatgctcaagtttcatacataatgccaaacttttttttcacagtggttataccaatttgcactctcaccagcagttgtcctatagccttgacaacacttggaattgttaggtttttaaattttgccatggtgagtgtgaaaagtggtggttatttttttgtttggttattattatttatttaatgagagattgggtcttgccacactgcccaggctggtcttgaactcttgggctcaagtgatcctcccaccttggtctcctaaagtgctgggattacaggcatgaatcatcatgccttgttttgtttggtttttattgtggtaaaaaacacataaaatttaccatcttaactatttttaagtgtacagttcagtagtgttacatatattcatattgatgtgaaacagatctccaagtttttgtttgttttttgagatggagtctcgctctgtcgcccaggctggagtgcagtggcgcgatcttggctcactgcaacctctgcctcctgggttcaagtgattctcctgcctcagcctcccaagtagctgggattacaggcgcccaccaccacgcctggctaatttttgtatttttagtagagatggagttttaccatatcggccaggctggtcttgaattcctgatctcatgatccgcccgacttggcctcccaaagtgctgggattacaggcacgagccaccatgcccgacctccaaaagttttttatcttgcaaaactgaaactctgtacccattaaacaaaactccccttcctccagcttccttcccccagcctctggtaaccatcattctactgtttctttgaagttgactttatttttattttttgttttgacaatcttgctctgtcatccaggctggagtgcagtggcgtgatctcgactcactgcaacctctgcctcccaggttcaagcaattctcatgcctcagctacccgagtagctgggattacaggtgtgcaccaccatgcccagctaatttttctatttttagtagagacagggttttgccatattggccaggctgttctcgaactcctgacctcaagtgatctgcctgccttggcctcccaaagtgctgggattacaggcgtgaagcaccatgcccagcccctgaatttgactttagacacctcagataagtggaataatacactatgtctttacttaacataaagtcctcaaagttcatccatgttgtagtatgtgacagcactttcttccttcataaggctgaataatattccattgtatgtacacgccacatttatccttccatcagtggacatgtgggttgcttccacctctttgttattgtgaatactgctgctatgaacatgagtctgcaaatatctcaagaccctgctttccatttttttttttttgatatatacctggaagcaggagttctggggtaattctatttttaatttttttgtcatctggtagttctatttttaattaagaggaacctcttcatattgttttctatagtagtttcaccattttataatcccagcagcagtacacaagagttctaatttcaaagtggtatatttttatcttgcatttacttgacaattaatgatattgagtacttgttcatttagacctttagttcatttagatctccattttaataaggtgtcctgtgtttttgtcaatttttcaaatggcttgtctggaagagttctttatatattatagatacaggatctttatttgttatatttattgcaaatatcttctattgtatggcttcctgttaatttcttaatggtattatttggcaagtttgtattttgttttttcttttttttgagacagtctcactctgtcccccaggctggagtgcagtggtgcaatctcagctcactgcaacctccgccttccaggttcaagcgattctcctgtctcagcctcctcagtagctgggattacaggcacacaccaccatgcccggctaatttttgtatttttagtagagacaggggtttcaccatgttggtcaggctggtcttgaactgctgacctcgtgattcgcccgcctcggcctcccaaagtgctgggattacaggcgtgagccactgtacccagccgcaaatttatattttctaacggagttccatttatcaatctttcctttatggttagtgtgtatacgtgcatttcttgtctgtttaagaactcttagctactcttagaaaatacatttactttctagaataattattctcttaccttttatacttagatctacagtccatttgaaatagatctttgtatatgattatgagtgcaaggtgaaattccatttttttcacatgaatatccaattgatccaatatcatttattgaaaagaccaacttttcagttccatcttcatcataaatgaagtgtccacacatgtatgggcctgttattggactcttcgggacataagtcctattgacttatgtctatcattgtttccaaactgcatcgttgtaactattgtagctttatagtaagtctttttttcttcttgtatttagagacaggatctcactatgttgcccagagtggcctcaaaaactcctgggctcaaaggatcctcgcacctcagcctcctgagtaactgggactacaggcgtgtgccaccatgcccagcttacaaatcttgatattcatagtaagccctcccacttcaagattgtcttgatagtcgccttgatattttgcatttccctataataatgtgtatttccacaaaaacattatgggtgttctgacttggaatgcatgaaatctgtttatcaatttgggaagaagtgacatttttacaacattgagtttttaaatcagcaaatatacaacttctctccattcatttagggatggaatccctgatcttttatttttaagtccttcctgggttttatcccctcccttgctgtcttctctacgacctaatacaaggatcagggccccttcctcctcacctgacttagggtcgccaggttttccattggccatggggggagggcccagaaggctgggtggtcctaagagcagacatgaaaatatggtcatcagaatggattaaaggactgatgattctgttcttaggtgtttttcttgtattacttatttcttaattcaaccagtaaagtcaggtatattttcagcagtcttgggagttctcaccccatctatctgcccttttttctgcaaagctgtttcagggtttgcaaaaagtagatattcaatcaaaggggataatgcaggaaaagatactgacaactttttttcttcaccgtaccgtcgctatccaaaacaacctaagtgtctccagacatgaaccaatccctcaccttaactgctggccagaggactagtttagagaaagctgcacctgtaccttttcagtcaaagtctggatacaaactgtcatcccagtcatcgcaatctgcaacatctctactacccctttcccctactgttctgcggctgcgcaaaagagctctttattctctccacccccgccttctccagaaaggtctggggccgtattgaggttgatggttccagtaagagaactcctggttcaaggctccatttgggagagccccacttccatccctccccagcgcgtgcgcccttcctccttccgttacagccccctccttcgcaccttattagcccctagccccttgcccggacgggcttgacaggcatgtgcacatccctcccagacccctcaccgatgggactcccatcctcctcatctccagtctcttcccgctcgggcagcgggggctgctgctgtgtcggtggctggtgatgattctgcttctttcgtttcggcatcgtgtctgcggcaatggctgcagcgggatttggagggtagtgaggaaggggcacgcggggattctgtttccgcttccggggggtcggtgggcagcaatgctgaggctcccgccattccacttccggaaggttgcggagaacatctgcggcggccgcattccggagccaactgcctccctccgtctctgccaggcatggcggcaacctcacaccttccctttgctgcgtttctataaatgctttgaaaaaattactcttttcttccctcgctggaaaacaccacaaccagctcctcagagtgtgtcacagagtcaacaggctctcgggccagagggcctgagaagaggactgtcgcaccgtaagatcgccacatccggtcctcggttactatggtaacagctgcaggcacaacttcgtgccctttgacctccccccaaaagtccttgtcccgcttgggtttcccttctcgcccgcttttgcacttatgatctgtaaacctgctccttatcatcgttcccacaaggaatttgggtcccaacaggtcggcacccaggactctcagaccgccgccctcccctaaagacctctgaccgtgcccccggtgtagtccagcaacctggacgcagtctcgtctttccactaaggtcaagcccggggctttgtagtatagcctcagcgtgtccacgccccctctcccctaggtagtaggccccgccctccgctccgccgccccctccaggtgagtggtaggttctcccgggagcgcaaggtagtgatgacacgcgccccccctcctccgaacgcgagttggtagcgtccgtgacggagttagcctggtcctcccacgcgcgcctccttcctcgccgccggggcgccctctcggtgccactggctctcacgtgccagtagcccaccccgcatcatcctctcgcctcgctcctggagggaagtgactatatctcccccgtccgccttccatcgccgccgcggcggtaattctgtcgggcccgcccgctgacgtcacctgctagccccgcctcctctagggtcccgggcccctgcggcgggggctgccccggggggcagtcagttgaggcggcgggagctcggcggagggcgggccaggtgactggtccgggccatgccgaggaagaagccattcagcgtgaagcagaagaagaagcagttgcaggacaaacgggagcggaagagaggtcagtgcgggagcgggaggagggggcggggctcgggcttccgcacatctggaaggaggggtgtgcccgctgcacctctggggatcgtgggagggggtcgtgggaccgcgtcaaccctcgcggcctatcgcggaggggatcccccaccccccctacatctggaaggggtggggaaggatggagagttgggggaggggaatccctccagctagcacggggcgccgtccccactgctccctgaaggagtgactccccccacgcacatccgggagggtcccaaatagggtgtctgggaggactgaacatcggaagaagttgagtgggatgaaagggagtcaggccgatgggggagagggtcttatggcccctgagagctggccagcactggcgtcaccggcccctccccgcagggcttcaagatgggctgcgctccagttccaacagccgcagcgggagccgggagcggcgagaggaacagaccgacacctcggacggggagtctgtgacccatcatatccgcaggcttaaccagcagccttctcaggggctgggtccacgaggctacgacccaaatcggtgagggtgggagggggcgctggtcccggctttcccgcctacccggaagtcagagctttgggggaaagcgggctgctactggtgaagacggtgggcctgggatgccacagttctccgctagccactcggctccccacagcgggccacagtcttcctttccagaggggctggagagagttgggcttttagaaggagaaggctgagtattgcctgaaagaaggacttgggggaagtctgacttgagagaggagacttgaacgactctggagagaatggtttgcgaagttgattgtacaagaggggagaaaataggagtttgtggccacaggattgctctggatgtctcggtccctgttcccttagataccgactgcattttgagagagacagcagggaggaggtagagaggagaaagagagcagcccgggagcaagttctacagccggtcagtgctgagttgttggagctggacatccgggaggtgtatcagcctggctcaggtgagtgagagcaagacaggcattgggctggggaaggagtttggaaaggtaaaagccgactgtgaggaaggaggggtctgggatgtactcttgaatcctgaagatttcctcacacttggactttttcctgaattcccagttctggactttcctcgacgtcctccttggagctatgagatgtccaaggagcaactaatgagccaagaggaacggagcttccaagactatcttgggaagattcatggggcttactcctctgagaaactcagctactttgagcacaatctggaggtgacagtgtactctagggacaggagtggggcatagtgacctatggtcaaattggtttgggatcaggctggagagggactctgttttcagtttctcttcctgatcctgtctttttagacatggaggcagctgtggcgggtgttagagatgtctgacatcgtcctgcttatcactgatatccgacatccagtgagtactagggataagggtgggcaaggaggagggagaaaggtttttcaggggcaaaggtcagaggcaagagttgggagacagagaggtatctatcttcctgtctttctaatctctacctagtgctgatgtccgcagttaggaactcagttttttattctcttatagcctgtcattcctcccttggccagctcactcttctcttcaaaacagccatgtcctgtcctttagctcatcacagaccaatagaaaatccaagtgttggagctccagggattctatgaatgcagctggggacttcctcctgcccagcccaaagatgccctttcttccttatctcatttctctagcactgccacatcagttgctacagaacccacctggaatgctagagtagtagttaaggctgtagactgctgctggactgccctgtgtgaatcctagctctgcaacttcactcttgtcctccagtgggagaaagggaggtctgtgaggaccatttaggttggaggtccttaataatatgtacacacacatactcacacgtacatcatgtgcacatcaatatacacaggcatgtttgcacacatgttcacagtcacattaacacacaaacatgcacacatgtgcacgtacttgcatgcatgcatatatgcacgtgtacacacttacatagttgtgcacacacaaaaaagcagactaatttctaccctaacccccatccctgtttccgatcccagcctttacctcagtgtgctaagtgatgctgtttccttgtcttgttttgggttcatttccatctctaatcatgacctataggaagccctctgagactcagaagtattactaacccctgttttgtctttgtttttcagtttgtctggtttatagtttttagcccagagtctgctaccaccagggccttgtctctgagctacacctgctgagtggggagctggaggcagagaactctgggttgactttcactgctccatcctcttatcaactctgtcctaggttgtgaatttcccgccagcactttatgagtatgtgactggagaacttggactggccctggtgctggttttgaacaaggtggatctggccccgccagctcttgtggttgcctggaagcattatttccatcaacactatccccagctccacgtcgtccttttcacctcttttcctcgggacccccgcaccccacaggatcctagtagtggtgagtgggcaatgagagagggcaacttgggagaggtgagttggcaggggacaaaggggagaacagagaggcttattgacaagggggcacctggtcttgggcctaagggtggtgggagagatgagaggcctaagcccgtgtgcccatccttttgtgccctctgatctcagtcttgaagaagagtcggaggcgggggagaggatggactcgggccctggggccagagcagttgctgagagcctgtgaagccatcactgtggggaaaggtatgtggcccttagaggagggctgtaggaggacatgggggagaccaaagatgcagaatcattttgctcacctttcctgaagccaacccctctatggtggatatgtgcaagaggccaggggaagggacagaataaggagcagactgacttggtgggacgagaggcagcaggtagtcaggagcctcagtggcttgctgcctttagccttcccagtacttttcagaagctcagagaaacgtgcgtgattccagggagggtagggtcaaatgacttttgggagattctctgacctgctcttatttaggttggcactgtacaactccagagggtgccagttacataatctgtgcagggcacagtatgtgccatcatgcacagcagccctggggagaacctctttaatcttctccttctttgagcagtggacttgagcagctggcgggagaagattgctcgggatgtggctggggccacctggggtaatggctctggggaggaggaggaagaggaggatggcccagcagtcctggtggagcagcagactgattcagcaatggagccaactggcccaacccaagagcgctacaaggatggggtggtgaccatcggctgtgtgggtaaggaagtggcagcttgtgcgtggtggcctccaaggaggtacagagttttcatattcggagaagagagagggcgatcaggtctcattaggccccagggtgtctgaggggtgatctctgccagtggcggtgggcaaggcagaagaggcgtctgctgcagtggaaggatcatgacagcctgagttaaattccacctcttctcagctgtgaggtcttgagtaagtgattttgctactctgagtcttagttactttgattttaaaaataaggacattgatacctgagtaaaagaatggatgacggccatgtgtgagggctcatgcctatatagtcccagcgctttgggaggctgaggtgggaggattgcttgagaccaggagctcaagactagtgtgggcaacatagtgaaaccccatctttacaaaagataaagaaaactagccaagtgtggtggtatgtgcctgtagtctctgctacttcagaggctgaggcaggaggatcacttgagcccaagagttcaaggctgcagtgagctatgattgtgccactgcactccagcctggctgatagagaccctgtctttaaaaaaaaagaatggatgtgaggaatgatgggaatagtgttaagagagtgtaagaatgcctgacaaatagtgataacaataataacaattattattgttaaaactcagtatttatatggtgcttactatgtaacaggcactgttttaagtggtttatataaaccatttgaattgtagtaattagtctgtagtacagtgattatcaaatcatagtaggagctcagcaagaattagtattcttctaggttttaaccctttaagtttgttgccaaggagaatctcctcttaagggctttgtctcagctcacagtggaggaaaaaggaatgtatgattaggacccagggcccgtcttcatttagggtgggagaggtaagaagagaccttggacaagttatggtatccgaggtgatattggaaccaaaaagggcccaacccagaataaatttgggagtgtggagtaggtagttgggttccttggaagtgccctgacttatctctgtgtcctttttgtctttggaagaacctgccttactgctgagtgattgctcctctttccagtcatttcacccggctgtcccttccctgacttctgatcctagtctccctgtcacaaggagcctctgttccctctcttagcagcctctgctctagctgatctctattccaggtggtgtgagagggagagtgtttgctgtggcacaggcacccctgagtttggatttccctccagctctcattcatttacccattcaacaaatatgtactgaacacttaaccaggtgccagatattctagggatgggacatactgctgtggaaatggcaaaaaggtctgtagattcatggagcttattttcttgtgagtaaatagattttgtgatccgaaatcatgtaggggcagtgaaggcaataaagcaatgaaaggggatagagagtgactgagaggagaggtgctcagggaaaacctccctgaggagagaactggatgatgagatgaagtgagccattcagaactgtggggaaagggtcttgaggagggaatgggcttggagattctaggaccagcaagagtgcccaggggattggagtatgggagccaggataaagtactggggatgaggtcagcaagatcaccagggcccacatcatgtagagccctgaggctgtgacagccattttggattttattccaagtctcatgagaagccaagggtaggttttgaacaggggaatgataggatctgattttgtttcttataagtttacctcctgagtagagaataaatgatggggggtgggcaagaaagggagcagagagagcagttgaggctatttcagtaatctaggagagaaataagagttgcttagagtaggatgctggagctggaggtggtgagacagggccggaagcatgatatattttgaaggtagagaaaatgagatcgctgatggcttgcagttggcacgtgaaggaaagtgaggataaagaaggacttccaggtttttgtcttgagcaactggaaatactgagatgggaagactgggggagaagcagatttgaaggctttggggaggagaggggaatcagaaatgaaatttcagattctttttaaatatccctagtggagatgttgaataggcagtgggtaagtagtcagcagcttaggggagagaagaggacggaaatttgaatttgggaaagatttaaatttggggaaccattgatggatataagtggtatttaaagccacaggattaggctgggcacagtggctcatgcctataatcccagccctttgggaggctgaggcaggtggatcacttgaggccaggagtttgagaccagcctggccaacatggtgaaaccctgtctctaccaaaaaatacagaaaattagccgtgtgtggtggtgcgtgcctgtagtcccagatactcaggagggtgaggcaggagaattgcttgaatcctggaggcggaggttacggtgagccaagatcataccactgcactccagcctgggtgacagagcaagacttcgtcaaaaaaaaaaaaaaaaaagccatggaattggatgagatgtaggagagaaaggaaatagttggagaagaggaggtcaaggactgagccttaggacaagccagcatttagttgggcaaaggacagtgagaaggaggaaaaccaagggagcgtcccagaagtcaaatgaagaaggtgtttgaagaggaaaggaggaatcagctgtgtcaactgttgctgacaggccaaatgagagaacagagagctgctcagcaggcttggcaatgtgaagatccgtggtttcagtggggtggagaaagccaaactggagtaggcccatgagagaaggtgcaacaacttcacataacattgtgtgaaaagagtctgacccaatagcatccatactgcacaatttcagttctatcaagtttgaaagctgcaaaattaagctgcattgttgagagatacacaggtcataaactaaagagaaatgtaaggagttgatttccttaaaaggataaagcttgcatgtatagagggagaggattatgatcaagaaggatgagtggcggccggtatggtggctcatccctgtaatcctagcactttgggaggctgaggcaggcgcattacttgaggtcaggagtttgagaccagcctggccaacatggcaaaaccctatctctactaaaaatacaaaaagttagccaggtgtggagccgcacgcctgtggtctcagctactcaggaggttgaggcacgagaatcgcttgaacctgggaggatgaggttgtagtgagccaacatcgcaccactgcactccagcccgggtgagggagtgagactctgtctcaaaaacaaaaacaaaaaaaaacaaggacagatggaacatgttgtcacacattgggtggtatggggttcatcaggctgcacatgtatgttctgtgcatttttttgtatgttgtagtttacagttacaaagaagatagcaggaagaaatggtgaaaaaagtaggtaagtcttttaaggagttttcctgcaaagcggacagagaactaggtctggtggtggtcgtcaaaggagaacttttttctccctccttccctcccttcctcctagatacttgcatgtgttgtaaagagtgagcacagtggtacatcttttcttagccacagtcagctgcccaggagcagtgctgaatgggcagagctggattttacagggttgggattttgccaggtgagtaagatagaggggagaagtgggaccagggagttccaggtctgtgaacggccctggctgaggagctggatcatgaaatctgagtcaagtaagaaggaaattgaggacacgagttgggtattgcatagtgttactgtgttaaggtcaggggtcaaagacttactggcatggagtaaccagagtaagtgagctggaaagatgagttgtcagggcagagaggggtgcttggaattgaggctttggagctgtgaagtgacaagatgcaggtattaccatgggagtgggcagctgaggtggggtaaaggagatgctctgtggaagggagatgaaggcactgaagtcagccagaaacacaaaaactggtggtggtgagtgagcagagtggcagtgagccccaaggcttccagttttctccttggacaagtcatcgtaattattattattattttttgagatggagtttccctcttattgcccaggctggagtgcaatggtgcaatctcagctcactgcaacctccgcctcctgggttcaagtggttctcctgcctcagcctcccaagtagctgcaattacaggcgcccaccaccacgcccagctaatttttgtatttttagtagagatggggtttcaccatgttggccaggctggtcttgaagtcctgacctcaggtgatccacccgccttggcctcccaaagtaatcacgctgggattacaagcgtgagccactgtgccaggccaagtcatagtaattatgagatgtggatcactggtactgggtacttactgtactgcaggcactgacccacacaagttgtattggttatctcatttaatcctgaccaccctgaggtagggaggtgtccacactgtaaaatgaagaaacagaggctcagaaagttagttgccctgacatcacaaagctggtaagtggaagggccaggatttaaccctggcagcccagagcgtgatttgtattctgcaataccatttccttaatttctgagccttagttccccttttacctataggtatagcaccaagtcccatcacagagtagaaacctgttaaacgttaattttccttgccttcctcaggtttccctaatgtgggaaagtcctcgctgatcaatgggctggtggggcggaaagtcgtgagtgtctccagaaccccgggccatacccgatactttcagacctactttcttaccccctctgtgaagctctgtgactgcccaggcctcatcttcccatctcttctgcctaggcagttgcaggtatgacggggagggtgggtaagggaaagagagaaggtgggacattgaggaaagtactgagtgctcatttccctcaggttctggcagggatctaccctatcgcccagatccaggagccctacactgctgtgggctacctggcctcccgaattcccgtgcaggccctgctccacctgcgccacccagaggctgaggacccctcagcggaacacccctggtgtgcctgggacatctgtgaaggtgagttccatgtgcctggcttcgccccacctggtttcagctgctcttccttacctgcctcgccttttacccttccctgtctcctttcctctcctcagagattctgccattgatgaagctgctgtccactcacccctagatttttgttgcatagccagtaagatctctggcctggaatgttttggggaaaactggaaggactgtgttatgggagtgggagtataactggtacctggttaatgctttccctttccattattcttttcttcctccagcctgggcagagaaacgtggttacaagacagccaaggcggctcggaatgatgtgtacagagcagccaacagtctcttgcggctggcagtggacggccgcctcagcctgtgttttcatcccccaggctacagtgaacagaaaggtcagagcccagatattcttccccagccccctgctatagcgtaggtaaaagggtgtgggctttgtggccagagagagggtcaaacctggattctgtacctgttggctagctctgttacttaacatctgtgatattttcctgatctgcaaactgagggtaataattgacccttagcatagtgattgtaaagattgaagttgatgtgcacaaaggttctgttcagcaatctgcacataggaagttgaatgaatggatgaatgaatgaatgccagcagctctaaagattattgttattcctagtctttgcctcttccccatctttccttggctttagttcttgctcaaaactctcctccatttttttcttgttttggttccccaggcacctgggagtcccatccagagaccacggagctggtggttttgcagggcagggtggggccagcaggtgacgaggaggaggaggaagaggaagagctgagcagctcctgtgaggaggagggagaggaggaccgggatgcggatgaggagggagaaggggatgaggagaccccaacctcggctccagggtccagcctggctggccgaaacccttatgccctgctgggtgaggatgagtgctgagttcctcgcccagcgccatcttccctcccagtatctttgcttttggactgacctgggggtatctcccctctgccaccccaattgtgaataaagattgtttgctttgtagccccttccccagatgaactgaggtgagagcggctgttccaggctaacagctgtgggaggcttctctcctcttctcccttcttttttcatgcattctctttgcaagggaaagttctcttaggagtttagtaggttctcagtctctgaaacctgcttcctctacccattctcccactctgcaccttaggaatcccgttatctacatggggaggggaggtctaaatccagctcccttttggagtttgtgccattctccgatttgagcagcagccctgtgtgccccctgccgccagacctgctcattccaggagcttctgggagaaggaacagtaagagaggaactgtgtcccaagctgatgtctcttaatgagatttttacaggaattgttcaaattcagcaaatatttattgagggtctattgtgtgtcttgacctgtgctgagcaccaagcatataaggatgtaccaccagagcctgacctaaatttgaagcctggccatgatcaaaaccccaccttcaggcacccaagtttttggattaagaagggtgaatgatgttctccaaatcctgggggctcatgcagtataattctaggacttcatgttgatacaaatttttagttaaggcaaaacgcttgtgaaaatgttgattaaatgtgtacgagtagttttaattactggtgaacaactagcgtgcacatttatgatttgagcagaacagccctttaagtacagtgttaagtttcattgtttaaaagcttggca

SEQ ID NO: 22615 - DNA, 21843 bp, Homo Sapiens
gacacatttcaacactggaccgatcagacctctcccttagccattggtctgcactgtcttttctgcccatgacccagtcagtctcgcgccccatgaccctctcctaaaacacgcgcagtctcctctctcttccccttcctctcgtgtcttccttgcctaccagcctcacctgatgggctcgtgttctctccgtccccgatccactcgggctccggcagctgctgcttgggcgccttcggcatcgcggtggcagaactagaaacgagttacagatagaaactagaatatgctttttaaaaaaacaaaaaacaaaacaaacaaaaaaacagtatgcctcaactccttcatactagtaggaaattattatgttcattccttgagtctcgcggcgtcgggaggtcacggcgtcaggcttcccagacagtcgtaaacgccatgtgtttacgcgactggagcaagcggacgccggccccgctccgtcattgcaggccacgcctccactgaaccagggccacgcccccgagatgacggcgaagctcgcacgtgcgcagcccgggggcggggttggccgcgccagcttggagagccagccccatcggggttccccgccgccggaagcggaaatagcaccgggcgccgccacagtagctgtaactgccaccgcgatgccgaaggcgcccaagcagcagccgccggagcccgagtggatcggggacggagagagcacgagcccatcaggtgaggctggtaggcaaggaagaaacgagcagagggggaagagagaggagactgcgcgtgttttaagagagggtcatggggcacgagactgaccgggcccgtgcgggagttactgcgcatgcgtgccgtgggcccgggaggagtttgccggggaggagtgggtttggaatcggggttaaaggaaagagatccagatgtcgcacgtgacctaagtgagactgggcgagataaaagaaagagcatatggcaccgagggagagatggggagaaatgggaaaaccttgcttaaaaaatttggacatccgccccaccatacactgtattccaccaggaatatatgagccctgcctcgacctccccttccccctgcgcgcgcatacacacaccttgggagcctgtgatcccccttgtttctcaagagagggtgactccttcatggtttctttcttaagacacccctctcactcaactggagcaagagtgtagatttttgatgttggaatgagggttaaggtttacttaaaaagcagcgaaagtttgttaagcgcttgtttttaattaagcactctatatactgtgctttgagaggggaaggaaaaaaacatgaagatatcttcccagggttgaagtcagttttaagggggacataaatggacacaactaaccccagtaggtacacagtaactaattttaaaagcacttattggatgcctactgtataccaggtactgtgtggaggaagtgggaatgtagagataaaagataagactttccctcaagggacaacccagtatggtgaagggtcagagcattaaccagacagacagtggttgtcagagtatgatgaaggtgcttaagaatgttatgggactgtagaagagaggaggagcatctactcagacaggtaagggagtgtcagcaaagcctcccaagaatatgtaatagctgagtatttttttttgaggcacattgtagctccatcacccaggctggagtgcagtggcatgaacatggctcactgcagcctccacctcctgggtttaaaggatcttcctgcctcagtctcccaagtagttgagactactggcatgcaccaccacaccttatttttaaaattttttgtagacacaagatctggctatgttgcctaggctggtctcaaactcctgggctcaagtaattctcctgcctcagcctccaaaagtgctgggattacaggcgtgagccactacatctgctccccagagtttattcttgaaagatcatcgtgaattagcaaggggaagcgcattccaagccaaggaagtttgtggaaggtagagatgtaggcaagcctgactggtcccactagagcctggtgactagtgtgatgaagtcagaaagatgctcaggagacagataatgaaaggctttagatgccattccgaggagtttaatcctaaagacattaagaaggaaggcccattgaagtgcataaggaatgattatgaacagttcacctgtagcactgagcaatggagaatgaatggccttgaactggtcaagatggaggtggggagaccatttagggggctctggccatgatctaggtgagaagtggtaaggggataagccaaggcctgaagaataaagagttactaaggaggcggcattgatcggaactgagaactgattaaatgaagggagaagtaaggttgacacttaagtaacccagtgactagtagactattaactgaaagcagtaatggacaggagagtaagaagtggaaagagataaggtgaacttctgaatgctgagttaggcgtttctgaggatttctaaaaggaaatggcaagaagagagtttgtttagtcactgtggagagacaactatactaggagtaaagacacaggcaagtatagttgaagtgctggatatggaagagtcccctagagagtgtttgcagattgaaccaaaaagaaggttaaaggtgggaaccctaaagaacttcagcaattgcaggaagcaggtggggaaggaggctgaagagatgagactgagaaaggcaaacagccagagaaactggaggcaaaccaggagtgagcaagatcccagaaattaaataatgatagaagagaataaaaaaggtgtggaggtaggcagcatggaatgctgcagagaagtcaggcaaaataaggaccaaaaaatactttgtggtttgaggagctaagggttcagtggcaactttggcagaagtagtgttcattcggagatgataccagattgcagtatgtttcaaaggtatgggagaagagaaagtgaagcttgtgaattacgattttgagacccaatgaggacaagaatacgaaacagtaatgggggagaggggtataagggtaaagaaggcttgctttcttgccttgaaggagcagcttaagcgatatacgaaaggagagaagacacagtatatctctagccacacttaatctttttcagttccttggggattatactttctcacaatgaaactcttcagaggcttttcctgtccctataatgaagtggataagagtgattaaagtacaaaagatttttttggttttggtgggttttttttttttgtgacggagcctcactccaggctggagtgcagtggcgcgatctcagctcactgcagcctcaatcgcaggctcaagccatcttcccttgtagctgggactacaggcacacaccgccatgcctggcttattttttgtttgtttttgttttttgttttctgtagagatgaggtcttgctatgttgcccaggctaatcttgaacctctggcctcaaccagtcctcccaccttggtccccaaaatgttgggattacaggcgtgagccagtgtgcctggccacaaaagagatttaaaggaaggagagatggtatggctgtgttagtccttggggagaaattagtgtctgggatgagtcagtcatctgtgttgataaggtgagctgatcaggtttttccttcttaggtacttcagtagatccttcctcctaatgcctttaggattaaactccttggaatagcatataaagccttttattattaatcctgcacaatttttcaactctcacactagtcacccaatactgggctcagattttttttctttaacttttttgtttgttttttgtggtttgttttttggggaggaggagggccccaaactttgaaatgtgttctggatggaggatgcagattaagcaaagacagacataagcgtgcctgggacttcataaaggaacagaaagaagccagtatcgagaccagaggtgtgggtagggaaacagaaaagatagggtagggccattttagtctgtgaagcctttaattattggaattgtctctcgttaactctagttttttggagaagtagatgcaccataaaactttcctgaataaatgattactttgaaatacatggaattctagtctgagaatattttaatgtagtagatggcggataccattgactttttttcttttttttttttttttgagacagtctcgctgtgtcacccaggctggagtgcagtggcgcgatcttggctcactgcaacctccacctcccaggtacaagcgattctcctgcctcagcttcccaagtagctgggactacatgcgtgctctaccacgcccagctaatttttgtatttttagtagagatggggtttcaccatgttggccaagctggtctcaatctcctgaccttgtgatccacccaccttggcctcccaatgtgctgagattacaggcctgagccgccgcacccgaccaattttttttttttaatattaaatactgaaatgcttaagggtagaattagatagcagtgaatggaagggatgttttggaagagaagataataaataggcctaagcctgaagggaaatcatgaggctgcctccagtaggggagggagttggacatggtcctctaccttcagggaaacaaggatggagagggggagagctagaatctgttgaatctgttttggctttactgggaacacaggctaaacagtctctcaggttactctctagaatgaaagcacacagacaggtaaatatgacacaatgtgatttgtgctataatattcaagcagaacaagtaaggcatagactgaggtgttcatttgcttaccagataactctatttacatggcctataggttttacaaacaacgtgtccccctggccaggcacagtggctcaggcctataattccaacagtttgggaagctgaggcaggagaattgcttgaggccagaggttcaggattagcctgagcaacatagtgagacctcctctctaaaaattattatttttttaattaggcaggcatggtggcgcttgcctgtagtcctagctactcaggaggctaaagtgggaggatcacctaagcctaggaatttaaggttacagtgagttatgatcatgccactgcattccagcctgggtgacagagcaagaccctgtctcttaaaaaaaaaaaaaaaaaaaggagggtgtgtgtgtgttgtatacatgtgtgtgtatctacacatatctcccaaattgaatttataatatcttcttccttcctataagaccttctcttccactgcctccttaattaataaatggtaccacttagcccagctaattttgccagctaaaaacacaggagtcatctctgagtgctctttttttttttttttttttttttttttgagatagagtcttgctctgtcacccaggctgcagtacaatagcgtgatctcagctcactgcaacctccgccctgggttcaagcaattctcctgtcttagcctcctgagtagctgggattacaggcgcccgccactatgcctggctaattttttgtatttttagtagagactgggtttcaccatgttcaccagactagtcttgaactcctgacctcaagtgatccgcctgcctctgcctcacaaagtgccgggattacaggcatgagccaccgcgcccggccgggtgctctttattccccacctctagccccatcctatgaattcttctttatgtccgcttgtcaccaccacccagactactctgacagcctccccagtggatttcccactatgcttattccctccgattcttgctgtactctgaagccagagtgaaactttaaagtgtgaaagtgatcataccaataaagtccccattccttaaccttgctacaaggccctcactccagccttaccttgcaccattctcccctcagtctgtaagcttagccataccaaacctttccctgtctctcagtgtgtgtgctttctcacagctgggcctgtgcacagcactggaattacaccatgtgtctgactaacttctcatactcctcattacttcagttatttgcttaaatgccatcttcttagagaggccgccaccagagatgaagccagcctctcccccaccaccaagtaggctttaccttttcttttggaaccttcagtacacctggaattacctattaaaaatctctcttcctatagcctgcaagctccagaggagaccacatttgtcttgttcattgctataatcccctacgctagcacaatatctgacacatggtagctgtctagtagatacttagtggatgaatgaatagagatgggaattattatttctgcaggagttgtgagacagtacaaatatttaaggagtgatagttaagctagaaaaataataaaataggatagaggctacagagatctttgcaggggggatcagactgctttggaatttgcagataagcattcacgatgtccgcttaactttctagacaaagtggtgaagaaagggaagaaggacaagaagatcaaaaaaacggtgagaaaatgagggttgaggataagaaatgactatggatgtttccaagctaaataaatagccatgtgaaggaggtgggaggtccaagggaggagaaaagatcttgtcaagagaggagataggcagggcacggtggcttacacctgtaatcccagcgcttagggaggcagaggtgggaggatagcttaagcccaggaatttgagacctgcacactccattctccacaaaaagaaaaaaaagagagagacaggaggtaaggtgagggtggagtggagggccagtgggccaatgtgtggcagagcacagcctgcttggattgctcttggaaacatgtttacctgtagcttaactccctttatagttctttgaagagctggcagtagaagataaacaggctggggaagaagagaaagtgctcaaggagaaggagcagcagcagcagcaacagcaacagcaggtacaagtgccacagggcccaccaatcctgggaggcatctgggttccaccaacccctttccagcccatgttgctccattcagctgatggggaaccctctgtgaggcagaaatacagcaggggcctgggcttcattttctcactgttcttttgctctcagcagcaaaaaaaaaagcgagatacccgaaaaggcaggcggaagaaggatgtggatgatgatggagaagagaaagagctcatggagcgtcttaagaagctctcagtgccaaccagtgatgaggaggatgaaggtaaatgacctgagggggaatgggtacctggaatccatgagtcatggagagtgatacctcataccctgatcttcaagttggattcaattggggggccagacattgtaattctttcctatctcatgttctccccctgtcatttcagtacccgccccaaaaccccgcggagggaagaaaaccaaggtaagccatctgtgtggtaaacggagactccaaggatgcaaccttgaccatcctactgacttctgtggccctttcattctctagggtggtaatgtttttgcagccctgattcaggatcagagtgaggaagaggaggaggaagaaaaacatcctcctaagcctgccaagccggagaagaatcggatcaataaggtgacagtggtggctcgatcagtcactctcactccatttagcaccttctggccatggtggagtaatttcccgcttttaaactagctcttctcggtctgtcttacttatactgttaaaatcatctttttagaatacatgcccaggctgggcacagtgggtcacgcctgtaatcccagcactttgggaggccgaggtgggcgaatcacgaggtcaagagatcgagaccagcctgaccaacatggcgaaacctcatctctactaaaaatacaaaaattagccaggcgtggtggcgtgcgcctgtaatcccagctacttggaaggctgaggcaggagaatcacttgaacttgggaggtggaatttgcagtgagctgagattgaggcactgcactccagcctgggcaacagagcaagactcagtctcaaaaaaaaaacaacaaaaaaaaccatgccatttttatcactcagaaatctacagtgattctgttgctttaagcacagaacctgaaacaaagccccaggtccttgctcttctacttgtgactcttctgcgtgtgcatcttagtccatgtccatttgagctcttgagaaagcctccagtgctagtgccactcactctggtggcgcacttgcctgacttataatccttagccttgctgacgttccctagttatctcttcgctatctagtctgaagctggagggtagggtttttctgggtctcatttttcgtcagcagcactcaatacagatggtctccaacttctgcttcggtgtacgatttttctactttatgatggtgtgaaagtcatactcatttagggtactcctcaactcatgatgggattatatccagataaacccatcataagttggaactatttttttttttttttttttttgagacggagtctcactctgttgccaagctggagtgcagtggcgtaatcctggctcactgcaacctccgcctcccgggttcaagtgattctcctgcctcagcttcctgagtagctgagattacaggcacgtgccaccacgcccagctaatttttgtgtttttagtagagacagggtttcaccatgttgaccaggatggtctcgatctcttgatcttgtgatccacctgccttggcctcccaaagtgctgggattacaggtgtgagccaccacgcccggccaagaactatcattttttatttaagtttctggtgggtttatcgggatgcaacctgtcgtaaatggaggagcatgtgtatggttaacacagtagactctctagaaatgcttattacacagcaaagtagcacaataatttgtatgtatgtgtgtaatgtgtatgtgtgtctcctccaggccgtatctgaggaacagcagcctgcactcaagggcaaaaagggaaaggaagagaagtcaaaagggaaggctaaggtgagagagtaactagcaggaggaggtattggggcccaggaattaaaacatttcatcagggctgggcgcggtggctcacgcctgtaatcccagcactttgggaggccgaggtgggcggatcacgaggtcaggagatcgagaccatcctggtaacacggtaaaaccccgtctctactaaaaatacaaaaaaaattagccgggcgtggtggcgggcgcctgtagtcccagctactcgggaggctgaggcaggagaatggcgtgaacccgggaggtggagcttgcagtgagccgagattgcgccactgcactccagcctgggtgacagagcgagactccgtctcaaaaaaaaaaaaagaaaaaaaaaaaaacatttcatcagacctgtcttttccctattagcctcaaaataaattcgctgctctggacaatgaagaggaggataaagaagaagaaattataaaggaaaaggagcctcccaaacaagggaaggagaaggccaagaaggcagagcaggtgtgtatttggtgttggggcaaggtggaatgagggactagggcttccagggtccttatgggagagttagaatctggggatatagttattatcccagcaaacctttattcttttctttttttgggggagtagttggggtggtggttcgtttgtttttgtttttgtttttgtttacacaggatcttactctgtcactcaggctggagtgcagtggtgtgaacacggctcactgaagcctcaacctcctgggctcaacagattctcctgcctcagcctactgagtagctgggactacaagtgtgcaccactacccctggctaatttttttatttttagtatagagatgaggtctcactatgttgctcaggctggtcttgaacttctgggctcaagcagtcctcctgcctcagcctcccaaaatgctgggtttacaggtgtgagccagcatgccagccagcaaactttttctataaagggccatatagtaaatgtttttggctttgcaggccacatacaatctctatcacatattcttttttttttttaacaactctttgaaaatacaaaaattatttttataaagttcaggagctatataaaaataaatgtcaggtcagccttggcccatgggctgtagtttgcaacacctaatccagtgaagaaagggcctggaatttatctcagatgatctgggtcctggctctgccttcactggctgtgtgaccttgaatacatcttcccatccccttgggtctcacttgtctcctttgtgtgatagaaggaggagtccggagatctctagggtccctatgcgtctggcacttcctaattctgtgattctgctggattcctctgactgtgcactagagcttcctgatctttttttttttttttttttttttgagatggagtctcactccgttgcccaggctggagtgcggtggcgcaatctcagctcactgcaacctctgcctcccgggttcaagcaattcttctgcctcagtctcccgagtagctgggactacaggcacgtgccaccatgaccggctgattttttgtgtttttagtagagacaggatttcaccatgttagccaggatggtcttgatctcctgaccttgtgatctgtccatcttggcctcccaaagtgctgggattacagacatgagccaccgtgcccggacggctacctgatcttttctttgcatgttaacaaggaaaccacagaaactcattttatacaaatgaaactcttgaaatccatttactccaccttcagttacattgtattgggagttacatttatagggacataacgcgttgtcacatttcataaatacacattcataccatttgtcttgtaccattcctggtagcagaaattaataaaggacctcagggagaccaggggctgggtatgagaatgagagaggatcccaagatattttaggactctgagtagtgaaggaaagagctggggcagggacagggggcagatgatgtgaaatctgagttctagaaggagtccctagtttttttttgttgtttttttttttgagacggagtcttgctttgtcacccaggctggagtgcagtggcacgatctcggctcactgcaagctcctcctcccaggttcacaccattctcctgcctcagcctcccgagtagctgggactacaggcgcccgccaccacgtccggctaattttttgtatttttagtagagatggggtttcaccatgttagccaggatggtcttgatctcctgaccttgggatctgcccgctttggcttcccaaagtgctgggattacaggcgtgagccaccgcgcccagccaggagtccctagttttgaccatccccgggttctcacagggttcagaggaagaaggagaaggggaagaagaggaggaggaaggaggagagtctaaggcagatgatccctatgctcatcttagcaaaaaggagaagaaaaagctgaaaaaacaggtaagaccttggttcttagcggtcaaaagtaggggatttttaaatacttcaactaggggacatgcgattggggacacgaaggaaaggtttgggggctactccaagtaaaacaatcggagtaagaaaataattgtgttctgtgaaccttatctcaatgtctgatgacatgggctgtttcactttggggttttttgtttattttttgagacagggtctcacactgttactcaggctggagtgcaatgacgtgatctctgttcactgcagcctcaacctaccaggctcaagtgatcctcccacctcagcctcccgaatagctgagactatgggtggcaccaccatgcctggctaatttttgtattttttgtagagacagtattttagcatgttggccaggctggtctcaaactcctgagctcaagagatccacctacctcagcctcccagagtgctgggattacaggcgtgagccagcatgcccagccagcatgggctgtttcatggtgatgggaaactggtagactgtggcttcaaatgtagtttttcctaccttctcagatggagtatgagcgccaagtggcttcattaaaagcagccaatgcagctgaaaatgacttctccgtgtcccaggcggagatgtcctcccgccaagccatgttagaaaatgcatctgacatcaaggtaaggtctcaaggggccccttccagtccacttacctagggaagagccagttctctcatcttccctgagtggctgtggtgtgtgaatgggttagttcagtgggaagaaagattggaggcattttccacaccttaggttctgccaacttgagcaagaagatagaaaaaccagtagaagtggggtccacccttggcagaaaatagtgtgggacagactagactagctgaggatgcatggggctcccattacaggcagcgaacagggcggggaccggctgtggggagaggaaggggattatgctggaggtagcggtttgtcaggggcttccctgcagggagaaagtggccgctcctgtcccaaagggagaattttcatgtgatcatcccttccctctgccacctctttcctgatggctgcagctggagaagttcagcatctccgctcatggcaaggagctgttcgtcaatgcagacctgtacattgtagccggccgccgctacgggctggtaggacccaatgggtgagaagaggagggagctggaggcaaaaaagggcctggagggaaaagaagagatttctcagtggtggccaggtcctaatagcttttattccccagcaagggcaagaccacactcctcaagcacattgccaaccgagccctgagcatccctcccaacattgatgtgttgctgtgtgagcagggtgagaccactggggagaaaaggggcttggtggggtgggcagttgggtagaaaagccagccagccaagaatagaagaaattgtggctatggagttggaagggatgtggagggagactggagaccgggaaagggatgctaaggaaaggaggggagggtcaatgaggaacttgagagtgttttatttggaacaagtacaaagagctgggcagggtcaggcaaaacagaaatgtaattgaagggaaagaaagatgagactcttggctcttgaggctgcctgactgttctccctctgcctcccagaggtggtagcagatgagacaccagcagtccaggctgttcttcgagctgacaccaagcgattgaagctgctggaagaggagcggcggcttcagggacagctggaacaaggggatgacacagctgctgagaggctagagaaggtagaggagatggcgcaggggacacgggcaaagacttgggggttcctgggaccctcagacgtgtgtcctcttctccctcctcccaggtgtatgaggaattgcgggccactggggcggcagctgcagaggccaaagcacggcggatcctggctggcctgggctttgaccctgaaatgcagaatcgacccacacagaagttctcagggggctggcgcatgcgtgtctccctggccaggtgggccattcacctcactgccctcccttccagcctcagaccaccggggcccttttcctctttcccttctcattcttccaaggccaatagggaggctcaaggcttacctctccctccttactatctgtgttgtgagaacttagggtctttctctatttctctccctacttggtggtgagttctcatcaacataccctgcagctgggtgcaatgggtcacgcctgtaatcccagcactttggaaggcagaggcaggaggattatcttgaacccaggagtttgagaccagcctgggcaatatagtgagactctatcttcacaaaagggggaagaaaacatatcctagcctgggcaacatagggagaccctgtctctacaaaaaatttaaagatcagctggatatggtggcgcacgctgtggtcacagctactctggaggctgaagtagaagtatcacttagacctgggagatttagactacagtgagcccttattgtgccactgcacgacagcctgggcaacagggcgagaccctgtctcaaaaaaattaaaccgtatcctgcccgagaacttctctgaggagagcttgggaaggcgtgttcatggtctcaggctctatctccgagttttctctggggttgtctgagcaaggatctttctctccctgaccctgccctctgctacccaccctctagggcactgttcatggagcccacactgctgatgctggatgagcccaccaaccacctggacctcaacgctgtcatctggcttaataagtgcgttacggcctttgcatcattggttcccattctgcactttcttccccttccctccctgccctgttttcctttagcccttctccactgtgcctgtgagtggagctctattcagacccccctttccctcccagcccccgttgtctgcctgcttcctctgaattctctctcacttgaccactgtgacacttacaccctgttctctgaaacccagctacctccagggctggcggaagaccttgctgatcgtctcccatgaccagggcttcttggatgatgtctgcactgatatcatccacctcgatgcccagcggctccactactataggggcaattacagtaagtaggattgtgtgtggatgcagggaagagatagaacctcgaaaagaggcctgagtgggagggcctatttagataaactgaatcctgtcagaattccagacagtgatgcctaccccatcaccaccagtccctggttgtccctttgctgggaagaggagcaaccactgatgcctggtcccctcttctgccccagtgaccttcaaaaagatgtaccagcagaagcagaaagaactgctgaaacagtatgagaagcaagagaaaaagctgaaggagctgaaggcaggcgggaagtccaccaagcaggcggtgagcacctgagggacttctgggctgggggccactgttctctcctggcagtggaggaagaaggagactctggaacgctggcctacatttcaaggactgccgtgcagggctcaggtttctcttttttcctcttcctctccaggaaaaacaaacgaaggaagccctgactcggaagcagcagaaatgccgacggaaaaaccaagatgaggaatcccaggaggcccctgagctcctgaagcgccctaaggagtacactgtgcgcttcacttttccagaccccccaccactcagccctccagtgctgggtctgcatggtgagtgccgcgggcctctgctgctccacaggaagcaccggaagcatgtatgtgcaccctaaattctccaccaaggctgagattgctcctgttctccaaggccagcacatgagagggactttgcagggactgaaaagaatataaattgcttcttttcgtggctttcaggtgtgacattcggctaccagggacagaaaccactctttaagaacttggattttggcatcgacatggattcaaggagtgagttggcggggttgcctcagggatgtgtagcaggagccacagggagagtctctggggacctctttgaccacctgtcttccatcttgcagtttgcattgtgggccctaatggtgtggggaagagtacgctactcctgctgctgactggcaagctgacaccggtgagtcctggagccaaggagggagagcatgagaaatgtgaagacacagctgcttttgccagaagctggaatcagggagcctctcgagaatgtagagttaaatacagaactcatgatagatgattcatttccctaagaggggcagtagaggaggaaagagcttagatcagttcaggggggagagctaagagaattaagatagaactagggggcacacccacgtgttttggttatacaagaaatatatgtcttttatagaacgattaaaaattgcataaacgggccaggcacagtagctcactcctataatcccagcagggatcacctaaggtcaagagttccagaccagcctagccaacatagtgaaccccgcctctactaaaaatacaaaaattagccgtgtgcggtggcgcgcacctatatcctagctactcaggaggctgaggcagaattgctggaacctgggaggcgggggttgcagtgagctgagattgcaccattgcactccagcctgggcaacagagcgagactccatctcaaaaaaaaaaaaaaattggcctggcgtggtggctcacgcctataatcccaactctttgggggaggctgaggcaggcagatcacttgagcttaggagttaaaaaccagcctgagcccactgtggtggctcacacctgtaatcccaacactttgggaagccgaggtgggagatcacctgaggtcaggagtttgagaccaacatgaagaaaccccatctctactaaaaatacaaaattagccagacgtggttgcacatgcctgtaatcccagctattttgggaggctgaggcaggagaatcacttgaacccaggaggcagaggttgcagtgagctgagattgcgctattgcactccagcctgggcaacaagagcaaaactccgtctaaaaaaaaaaaacagaccagcctgagcaacatggtgaaatcccatctctactaaaaatacaaaaattagctgggtatgttggtgcacgactgtagtcccagctacttgggaggctgaggtaggagaattgcttgagtccagggggcagaggttccagttagccgaggtcgtgccactgcactccagtctaagtgacagagtgaggctctgtcaaaaaaaaaaaaaaaatgcttaagagaaaaatctggagataaccagttttttttttttgttattttgttttgagacggagtctcactgtcgcccagcctggagtgcagtggtgcgatcttggcccactgcaacctccacctcccaggttcaagatattctcctgcctcagcctcctgaatagctgggattataggtacgccccaccatgcccagctactttttgtatttttagtagagacagggtttcaccatgttggtcaggctggtctcgaactcctgaccttgtgatccgcccgcctcagcctcccaaagtgctgggattacaggcgtgagccaccgctcccagctgagataaccagtattaatgttttagtggatatctttctccttttttctttgcaaatgtgcatataatttttaacaaaaatgggctgtcatatgagttgttgtgtagctagatttttccaaatatatcaagcatttttccatgcaattacttatttcatatgagtctaccttttttttttgagacagagtctcactctgtcacccaggctggagtgcagtggcacagtcttggctcactgcaacctccgtctcctgggttcacgcgattctcctgccttagcctcccgagtagctgggacaacaggcgcgtgctaccacgcccagctaattttttgtatttttagtagagatggtttcaccgtgttagccaggatggtcttgatctcctgacctcatgatctgcctgcgtcggcctcccagagtgctgggattacaggtgtgagccaccacgcccggcaaactctaccattttatttgaacttttgtaatatattgccatctagtgtgttagaaagtttgtagccatttctgctctctctagcagtgttgagaggccattttctcatatccagagattagatctttagaaaggtattattagattctccccaaaacactaaacttgccacatgaggcccttacgatgtaccattcgtgagtctcgctgtatggagagcaggtgttctttggctgtggttagtccctcctgcttgtccctcttgtcctccattttgcttaactccccttttgtcccttaactcttttactttgctcaccatgcctttgtcatattaggggaacatccctgttccttttcttttttgagacaaagtcttcccctgtccccgagggtggagtgcagtggtgcgatctcagcaacttccacctcctgggttaaaaccattcttgtgcctcagcctcctgagtagctgggattataggcatgtcccactatgcccagctaattattgtatttttagtagagacagggtttcacaatgttggccagcctggtctcaaactcctgaccttaagtgcctcctgacctgccttccttggcctcccaaagtgctgagattacaggcatgagccaccgtgcccagcccctattccttttcttatgcatacttgtccctggcccatttctggtgtttgtctctccttcagaaaagttggtgtatggacgaggtcaggagatcgagaccatcctggctaacatggtgaaatcccgtctctactaaaaatacaaaaaattagccgggtgtggtggcaggcacctgtattcccagctactggggaggctgaggcaggagaatggcgtgaacccggaaggtggaggttgcagtgagccgagatcgcgccactgcactccagcctgggggacagagcgagactccgtctcaaaaaaaaaaaaaaaaagttgatgtatggagctgcagcacctttttcccttgccctcctcttaactactttgtcttcccttgcagacccatggggaaatgagaaagaaccaccggctggtaagttggcattgggatttagggaatgataatctgatggaggaagtgtgactttaaccgaccacctccctctcttctcgggcagaaaattggcttcttcaaccagcagtatgcagagcagctgcgcatggaggagacgcccactgagtacctgcagcggggcttcaacctgccctaccaggatgcccgcaagtgcctgggccgcttcggcctggagagtcacgcccacaccatccagatctgcaaactctctggtaccacttcaggggccagggagggtgcccttcaccttatcattcatgtctacaaactgtacctagaggaaccgagaatgagggagcctcagctcacaaactggcacatcttgagggtttgccttcagaatgtgaggtgctaggtgtgacagccctccccttcctttgctacaggtggtcagaaggcgcgagttgtgtttgctgagctggcctgtcgggaacctgatgtcctcatcttggtgagtgagctgggctgtgggaaaagggataagggtaacagtaatggaagacgggagttgcagtgctcagtcatggaattcctcctatgtaggacgagccaaccaataacctggacatagagtctattgatgctctaggggaggccatcaatgaatacaagggtggtaagtcagctgagagtgtgccctcatccctgctccatggggaccaagctgtagtgtccttcactacagaagggcctaggactcccttatttcatgttctgattcccctctttctcctttcttcctgccctctgttgttgctatctttcttcaaagctgtgatcgttgtcagccatgatgcccgactcatcacagaaaccaattgccagctgtgggtggtggaggagcagagtgttagccaaatcgatggtgactttgaagactacaagcgggaggtgttggaggccctgggtgaagtcatggtcagccggccccgagagtgaagctttccttcccagaagtctcccgagagacatatttgtgtggcctagaagtcctctgtggtctcccctcctctgaagactgcctctggcctgcagctgacctggcaaccattcaggcacatgaaggtggagtgtgaccttgatgtgaccgggatcccactctgattgcatccatttctctgaaagacttgtttgttctgcttctcttcatataactgagctggccttatccttggcatccccctaaacaaacaagaggtgaccaccttattgtgaggttccatccagccaagtttatgtggcctattgtctcaggactctcatcactcagaagcctgcctctgatttaccctacagcttcaggcccagctgccccccagtctttgggtggtgctgttcttttctggtggatttaatgctgactcactggtacaaacagctgttgaagctcagagctggaggtgagcttctgaggcctttgccattatccagcccaagatttggtgcctgcagcctcttgtctggttgaggacttggggcaggaaaggaatgctgctgaacttgaatttccctttacaaggggaagaaataaaggaaaggagttgctgccgacctgtcactgtttggagattgatgggagttggaactgttctcagtcttgatttgctttattcagttttctagcagcttttaatagtcccctcttccccactaaatggatcttgtttgcagtcttgctgacagtgtttgctgtttaaggatcataggattcctttcccccaacccttcacgcaaggaaaaagcaaagtgattcataccttctatcttggaacatgggtctctttcctttttttttttttttttttttttttgacagaatcttgccctttcactcaggctggagtgcagtggcatgatcttggctcactgcagcctccacctcctgggttcaagcaattttcctgcctcagcctcccgagtagctgggattacaggcacacaccaccaggcccagctaattttagtgtttttaatagagacagggttttaccatgttggtcaggctggtctcgaactcttgacctcaagtaattcacctaccttgacttcctaaagtgctgggattatagggatgagccactgtgcccaacttctttttttttctcttttctgagacagggtcttgctgtgttgcccaggctagagtgcactgtaccctcaacctcctgggctcaagcaatccttccacctcagcctcctgagtagctgggactacaggcatgtgccgccacactcaactaatttttttttttttaatttttagtagagacagtgtcttgctatgttgcttaaggctggtcctgaactcctgacctcaggcagtcttcctacctcgacctcccaaagtgctggggtgctgggattatagacgtgagccacgacgcctagccagaatttgggtctcattgtccaagttaatctcatgaatgaggaggtgctctgccctgtggccagggaccagggtattgattctctcaaaaattattaaatcatctagccaaaatgtacggtactgtggggtatataagaagggaagagacaagatctgccttcattaatagtctggttagagaagacttaaaagtaagcatgaatagataattaatttgatcaattgtctaatatgtcgtactctagattctaagttgccacatactcaaaaaagggaaagattatccagggcctgattatttgacagggtcacttgagggtagatcttgaaaaatgatgatttgactaatcagggaccagggagccatttttcagaagtaggaaaagagcagatctcaggcttggggggaagaacaagctacttgggagttaatggatgatagctgctgtggccatttttcttaagagttagactggggagatgggtttggaaagtaaaatgcaaatggtgggtagtggtattaggtg

SEQ ID NO: 22616 - DNA, 18609 bp, Homo Sapiens
cagagcaacacagatttagtcaccacttgcatagttaacagctggttgtggcgctcgcttggggagtacatatgttatgctaaaattgcaacgatacagagattagcatggccccttaattagttaaataatttttaaaaagctggttatgcatgactgagggtggacaggggtcaattccatcacttaagttattttactgaaatggcattttggaaaaaggatgatacctaaccctggcgtttagtcctcggctcgggattagaaaatgcgcggggtgtggggggggggttgcaggaagtactgcctagacagctaagacacacgtgggaaggtctccactcgtggattcctgacagtggagcgacaacctcgagaaggtataaccaacttgaggttgtgcaaaatgtctttcgaagagttacctgaactctgtgagaacctcggaagagagatagcataggaagccgcctcagcacggtgtttaatacagacgccgccatcttgacgtacgcccaggacaggaattgacggaaaggcaactgcgcatgcttcaggaaactgagtagggcagggccaaggacaagcccgcagtgcggaaggcggccccacgtttgcgtcaggacggaagcgtgaaagggaaggcatgggggagaagctaatttcaactgcgtcacaatcgaattagaccccaaaattgcggttttttttggccagtcactacgactcttagatcgcattgttaaagtttgccttttaagcaattttgaaggcgatttttagcggtatcctctcagtgcgcatgcgctcttaggtttctaccaatcctgggtgagaaatgttctccagggcggaagtggcggaagcagaggaaagggaggtgctaggctcctggtcacgcgcacgcgacagggaggcaggaaggaggcggaagagagtgccagggaaaggggcggagcaaaggtgaagtgagagtagccaatcagttggcgagttgtcatttgggttgaccaatgagttcacgcctcgcgtataatgtctcgcgacaagggcgtttcactagcacgtttgggcgcgttgggcggcgtccgggtataaaagactccacccgagcgggcggccgccattctggggttcgtttagaggtaagtttgcctactttgtcgtctagtgggtaaaattttgcggagagcgttggatctgggaagcgggatagggatggatgggttcatttgagagccacggcttaaagcggttgcgatcaggatgggacacaggtttgtttggggacaacaaagatggcatttgtgagtgttttgaagcaacccgtactgattacatctttctcccttgtgttccttttatcccaggtttgaattttctcggagaaagacaggccggccacgaggaaaacagaaacaagccgcagcaacatctaagcccttgaaaggatcctgagagaggggggaaagggaaaacagcagccaccagcccaaccacttgtgtcttctgccccttcccacctatcttgcccaccccaccagcccacgctgcttgggacttgaaatctgtggccgaaggaccgtcactacataacttcaaaaataatcaaccaccctcccttcccaaaccacccaaattcactcatccagcgtttacttttttgaatccactcagaacttttttctgcgacccccctccctaaatggagttgggtgggggggaaatgaatactgagttggcctttattttttaaaagactttttgatccaatgaggccccctaaataattgagttttgggtcctggttggttgttttattttttttcctccaaaattttaccccctcccccctgagcccgaggtgctgacgtcgcaaaaaaattggatagtaagtgtcgaattttcaaaaaccagccttgcaacaagaaatcaacgtttcccgttgtgaaaccaaaaataatgagaggaagaaatgagaccatagaacaaatagagaactggagaaggaccaatctggtcacttaatctccattaaaaagggcctgtgggtctaaacagtcttgttctctctcccctaccacctatctcttccctgccttgctgcaggcaaagagagggtggagggagggccagcaagtgaggattttgatggttaacccttggtaatccagccaatttccagactgccaaagccatatgtgtttatataaggaggaatggttaccttcctctggttagcagcagtcttcaaaagggttaatgagctcacatacaagagatggtggatcttgtggcccagaagtaccacttctttgtgtgtgagacaagcagggtgcctttcaatttgccagattaataagcaatctgtacataaagattgcagggtaaggagatgggcagagagaagtaatagctcgctataactttttaaatgactgttaaatcctctcaattttaatgtaatttgcttggggtatatttgtgtggttaaaataggtggcaatctaggaataaagattgcaagacacttaggacaaaatataatcttagtgccagtacatacaagataatagttggggaggtaaagaatgtcttataattgttgcagattgcataggtatttaaaagcaaaagagtgattaacattttaacttgatattttttggtgggggaggtacagttaaatagagggtggaaaggttgggaaatgtggaatttaggagtataattttaaaagccatttagtgcaattgaatgctagctttctaaaagatttgtgtcgttaaaaggaatttttttcttccctgcttcaatatggcgactttccttgtccttttgtcttccaagcggcgttgcaggttgtgtcttgacccattttttttcctgtcctcccacctcaaccctatttgttgagaggggtccaagtccttcctccccctttccctctatagggaggatgggggtggtcgatggtagccggttgaacctccgttgcaaattcagttcttccctgcagaaaattgttctttttaatattttaattgctttaattttcactacgctcttactgatcaaaataggtcaaagattattcacgatggggaactggtttttgatttttttttttttttttttactaaaaaggtgttttataatgtaactgaagctaccggcagagccgggtggctttttagtttaagtcctctttctccattacaaaatggcgtccctccgtctttgttgtttttctcccccttttgccatcctgagcttagggccgccctagaaacttggtcaagtgggaggagcagccttgaaaggtgatgtaatcagctttcttcctcctctctccaccctcttgaagctccacccctgagcagatgcttttgcactgcctgtgctcgttgctgctagggagaagacattttccttattttcattatataaaatatcttaaagggataggagcttataggaattaagtatcaaggctgtccatctctgtgtagttctagtttttatagaaccagtttttattttcactttccttcactcatcacaactgcttgtaatttttccccacttcagctgccaggggtgaaaaaacaggcaaacctaagactgggaagctttgaggatgtgtgtgagcgtgtgtgtatgtatatatgtgtgtagagggagatgggaaagacacaagggcttgcaagagtaacttggagataaacgggcctaatgacactgaagtgtgccatttctgcttaggaaccagtgggcctcctgcatttggtcgctttgtgtaatgagaatcgggggaaggtgggtacttttaggactttcttctaaatcgccctcattcccacctctcagtttggggataaactgtattcagtgctgtatcacgttctgcacttgattagttcctgtacattggtactaggataagaagtgaatctttaggaaaggaggcggcagttgtaaactcaaggcagggggaatcaagctacggtttctggtaagcaaaacctttctggtattacatttcacaactttcattttttttttttccccaaagagccaccttttttgaatttctttttccttcccttctaaaagaaattcctaaaagcattaatgaaaaaatgatgtcctcttcatttttcaactcatgcagtgctgtggcatttggtgcatgttcagaagccatgccctatctgagggtggtattgggtgtctggttcctttcttcccccaaatttttcaaagtcaaatctttatcagactctccatataattttaatttttaaaagtcctgcactgaagcgtggaggttctaggcagaattggaaagtataactgccctctggtgacctgggtgagacttagggctaacttcctactgggtacagattctcaaattattacttaagcttctggattggatgggagggactcttcacatgtctgttgactacaagctttttttgttttgttttgtttttttcttttaagcagtttgccatgtgcctctgcagcatatcttccttgggagctgaacattctacccactggggttcctgatctctagtgagccaggggattaataaagaagatcttccttaacatgggagatgggaagccaggtctactaggggaaccacatccattcagaaaatcttggaaaacctgatccttgtagtttgtggccagagttctagtctggggtctttttctatgagtcagggtggtatatcattttgcatctttattggaaggcagataagcttttgaggagctcatgtatcaggtttgcaaaatgactgaggggtaggggcttactacttggaagaaagctatgaccttgtgatgaatcacctgagagacataattcagtccactattgtgtcaaactaggaagtgcctaaaacactgaagaaaggaaggggaacataaggggttaggtacaaatcattttcatttccagaagtgcctctaaattaaggtaaatttgggacttttttctccttttgttagaagacagttattttttaaagagctctgacttgcacagaatttttatcctgaaccaattcagtcctgtttcattggtgatgggtgtggaataactttagctatgctggatattttttcaccctatttaattgaataaccctcaagtaaaattcattttgaaggcaggagttggtgtcacagacgtttatctctggtaaaaatggtagaaaattccccaatgccttgtgccagtagagtatggctctgcctgaaacattctccataaggaacgcatagcttaggatgaggtggaggtaggccagggggttgctacctcactccccaccttctgtatgttctgcagtcaagaaaatagcagctcattaaaagaagacataatcatgccgtggattacttgtggttccagaaagctttcttaagctttcattctagactccagatcttgagtaggtaatgttacaacacttagtcacggcccctgcctgccttcatcaactcagtttgccttctctgctgtagccctgtgcccgaaatgttggactttacattcctttccacttgagcgccttggaaattgtttggtttttttccaaaatatactgacttcaaagcaaggaaactaggttataagacacttggggtccttaattttaaataagaactaatcttcctgaaggaaggccatcatgagaaaacccacttacattttatcaagattggtgctcatgagacaaaatttcacttatatttccaaaatataagtagtggaaaatgaatatttaacgctaattttgctttgtctcttagcttccctttgactattaatgtcttttattcttgtttatacatgtgggaataaaaaagtccctggatcccatttccagcagagggcactggacagaatttagctttgtactcattggtccatttttctaagactggctcttctttcttgtctcccatcctcttaaggaacacttgagctcagatgacagtttatttagtgtctgaaggaaataggggtagtaggtctatttattggcttagcttgtagttggatatgcaaaaaggaattctccagggttatatatattcaactctgggtttgaatcagtcaagggtaactggtttgaaatgatgtttaattcaaggccttttgtcaaattgcatatattttgctttaggaatctaatggtaggtatgtgtgtatatatagagagagggagttttaaaaatttcttagtctcttgattgcttatgatatgttgttattggaacccatacattgcttttccagtctccaacagatgtgatatctgttttatgtgtccctttatcgtatctctttatagtttctatagatcactttatagtatctcactacatgggaagaatacctttatttctgtgtctgtctctgtgtgtgtaggaatcaccacacttgagtggatttggcccacggacatctaatcttttccagtattctccttgaatgttttttctctgacctcaggttccacttgtatttgtggaggttccagggcagcagcgacttctcaacatttcttgcctcatctctccctctgttcagcccacaggttatgatctccagagccaagattatactcctacccttcctggctgcctcctccctgcttctgctgctgctcgcctaggttgttaggacctacacatttggaaacttactgacgtttttgttgggaggacaaaaaggctgagattgttatgctatgttttttcttttgtttgagaacaagtagaactaatttgcattatcttacaagaaacctgtgttttttccggcacaaaactactcatctttgtaaaatactgatttttctacccttctgctgggattgtgtctgttacttctgtgctagatgtaggatgaggaaggttttgttcttgcctcttccttgctactcagtgtgggccttattgcccaaaggcagatattgctgaagtggctttcttttttggtggttttttgtttgtttgtttttgaggcagcgtcttactctgtctctcaggctggagtgcagtggcacaatcacagctcattgtagcctcagtatccctgggctcaagcagtcctcccgttttcccacgtcagcctcccgggtagctgggactacaggtgcacaccatcacactcgacttatgttttgtagagatgaggtttcgccatgttgccaaggctggtttcaaactcctgcgctcaaggaatctgcccaccttggcctcccaaagtgctgggattacaggcatgagccactgcacccagcctcttttttgggtcttagaagcaagtatttagaggcagtgtagataaaaatcccaatcagaaccatattgatcctaaattacctttctggaacttcagttctggcttgtcccttccataaaaggagcttagcttttaactaattcccttcccaacctggtctaaaacagctgcttaaaagggaatttttctagcatttggctttatctgttccctttttaggttccatggttttcagttttaggctttcctaggggatcttgtacagcgtgatttttgaggagaggaccagattcgcatctttgcttttgaaagcacaaaccactagcttccttttaacttagagacagtaaaaacttgtgtagtgtttggctaatgagtgacagtctattcaaggtctaggaggacctgcttgatttccatgcatccatttgtctcaatctctggcacctactcccagatctccttagggagggattctgttttcaagttttgttttgttctccatcatctaccacttcagctgatacatatcttgccatgtgtagtgattatgactcttaatgggctaagataaaaaggactcaagtcttataagacatttagctcaaacacccaagattggcccaatttctatcaagctataggctgtttttcaagccaaatttatcagcaactagggaagacaggacttaacgataggtgtaaatgccctggagagttgaacatcttgttatgggaactgatcttagctttaatacgatctagtgaagttcagccatcctaggaaggatgctgctgggagggagggacaggtgtgctgccctactcctccaatcgaattgctttcctgttcagtcacatatgctccccatgcttaacttgccagggctattttctcagtagtggcaagtggtctgtgtcgatttttcatatctaaaaaatagcatagttgaataattagtcattatactttgtcaaatatagagatgtggtttattagagggcctactcgggtagtccttgccacccatttattctgtgggtttgtttgttttgtcctcttaccatagaaaccaccatcatgggttcgggtcccatagaccccaaagaacttctcaagggcctggacagcttccttaaccgagatggggaagtcaaaagtgtggatgggatttccaagatcttcaggtgagtctttacccctttttgtattcactgtgagtagagaatattgtgtgttaaaacatggctgcagttgaggcacactggaatgatcctggaaaggaaagggaaagatagtcagtgcaataggattaaaatgtaacaattttaggataagggataggaaaagatgatcacttgtttctgaccataatggaaactggagatttggacgtccacggtcccaagggagtcatgctttggaatgagagcagggtagcctggtaacagaattctagattgttttggttcgtgttccacctacccataatgttattttccttcagggattctcaggtttttcaggggagagtaaataactaagccagtcttgaacagactattagggacagttgttgagggatagccttatcacctggaggcagaatggaattcatcctgtgtgttacggaggcagcgatgctctcctccccaggtcagagactgcggtgtctctgttctcccataagtttccatgtcacactggatccatcccatcttcctagaggtatatgtgactccccttctctggagcaaagtcccaagtcattaggaatctctaggcagttcacagagaggcgcttttgctaagagaagagatactggctgcttcatttctaaccctaactcatcttctgcagtttgatgaaggaagcacgaaagatggtgagtcgatgcacttacttgaacattctcctgcagacccgttcaccagaaatattggtcaagtaagtggggatctggatggttggaatgggaaggtgtagcgaaaagatggggcggtgaggcatggggttcctcggtcattgatgggagactgggattgtaggatgtggtactgtcaaaacctagaaagggcattactgatagactctcctgcctgcctgcagatttattgacgttggcggctacaaacttcttaacaattggctgacgtattcaaagacaaccaacaacattcccctcctccagcaaattctactgaccctgcagcatctaccgctcactgtagaccatctcaagcaggtacctttagtctttaaaccctgattcttccttttttggtttagtctaatggatgaaaaactcaaactgactgatgtggctgtaatcttgggcctgtgaggtagaacagcagaaaaaaaataggaatttagaagaagaagacttggtttgaatttatctcctttaataggtgtgtggcggctgggcacggtggctcacgcctgtgatcccagcactttgagaggctgaggcgggcggatcatgaggtcaggagactgagaccatcctggctgacgtggtgaaaccccgtctccactaaaaatacaaaaaattagccaggcatggtggcatgcgcctgtagtcccagctaatcaggaggctgaggctggagaatcgcttgaacccaggaggtggaggttattgtgagccgagatcgcaccactgcactccagcctgggcgacagagtgagacttcgtctcaaaaaaaaaaaaaaaaaaaggaatgtgtcagccaggtgtggtggctcacacctgtaatcccaacactttgggatgctgaggtgggtggattgcttgagcccagtagttcaagaccagcgtgggcaaaaatgataaaactctgtctctacaaaaaatacaaaaaatttacccagatgtggtggtgcatgcctgtagtctcagttatttaggaggctcaggtgggagaatcatttgagcctgggaggtcgaggctgcagtgagccaagactgcgccactgcactctagcctgggcaacagagtgagactccgtctcaaaaaataaaaaaaaaaaaaaaagcagggaggactgtaacttttgtcgtttttagctctaagtggaattatttgcctcctggcatttacctttctgctgctcccatctctcatagaacaacacagctaaactggtgaagcagctgagcaagtcaagtgaggatgaaggtagggtgccacttctgctctctcatgggcttttctctattacttccacttaattaccttaatatcttttcccatccttggattgtcccttcacttttctctttctacctcaccttgctttttttccttcttttaaagagaaagttcctctaacctgtaccctctttcctgttctcaattccaaagttgttcatttctctgttgctgaatataaggtgccatactttaactggaagctgattcctaaaattgcttgttataaaacacatacacttaaaatttgctgtgggaaatagtatcatcctagcgtgtctcatctgtgaaactcctattactaaatgataaattatgaaatgagtttataagtggaaatgttggccagaagagaggtgccatagatcagagatgttatttgccaagtacaaaaggaaagagttacaaagtattttttcatatatttagaaacaaattttattcttgttttcacatctataaaggaaaataaaaagtcttcagattgttgtaacaattaggtgtgttatacataaagcaactaacgtagctttttaaaaaaatgtcagtttttgaggaactggtggattttggttacatgtataagttctttaatggtgatttctgagattttggtacactcatcacccaagcagtgtacactgcacccaacgtgtagtcttttactaatgtagattttaaccacatattctgaaatattaggtctttttactccagagtggtgtgatgacatcagagttgaaagttatccaagtagaacacaactctaattcattgttccattttttaagggtttggtttttaagcatatctcatgttcttcttaaaactttgggttactttctccgttacataaattttcacaatattttctcaaacctcccattttctgttcctggaagaatgttactttacattatttaggcatttcccctttctgtcacctgcagagctccggaaattggcctcagtccttgtcagcgactggatggctgtcatccgctctcagagcagtacccagcctgctggtaagctccttagtcctttatcctttgtatttatttctttcctattgggatgtggcctttaggtgctcccagtctgcttcacctctgacagtgttcatctaaataaaatccttttctgctttgttttttcacaacagagaaagataagaagaaacgtaaagatgaaggaaaaagtcgaactacccttcctgagcgacctttgacagaggtgaaggctgagacccgggctgaggaggccccagagaagaagagggagaagcccaagtctcttcgcaccacagcacccagtcatgccaagttccgttccactggtaagactggcggctggcctctggagggttcatgggcatgtgcacacccagagccttatgggggaatcatttgatgtgtggtatgttaatcgtaaggaagagggaagactagcagaggaagctttggttacaaggctagaagaacatttgcgggtgagaacgggaggaaaattcgggggtctggggtttgagttcagctgcccacaccgtgcttctttccccaggactagagctggagacaccatccttggtgcctgtgaagaagaatgccagcacagtggtggtttctgacaagtacaaccttaaacccatccccctcaaacgtcagaggtatggaccatattctcaggctctgaatggggtggatctgtggacacaagggagcaggagggggtgagtcggagatgttgatgacagttcctcttctgacagcaacgtagctgctccaggagatgccactccccctgcagagaagaaatacaagccactcaacacaacacctaatgccaccaaagagatcaaagtgaagatcatcccgccacagcgtgagtctaaagtggggaagatgtactttgaattaggagcaaacttttttttttttttttttggagacagagtctcactctgtcacccaggctggagtgcagtggcacggtcttggctcactgcaagctccgcctcccgggttcacgccattctcctgcctcagcctcccgagtagctgggactactggtgcccgccaccacgcccggctaattttttgtatttttagtagagatggggtttcaccatgttagccaggatggtcttgatttcctgacctcgtgatccacccacctcagcttcccaaagtgctgggattacaggcatgagccaccgcacctggccaggagcaaactcttatgggaatgaatgtccctgggaacgagaagttttttcccttctcttttattatttccctccattttcctttgatttcttggtatcccttactttttgtacctctggaactcccgtttcaggggtcacttaggagtaattttagagataagatagggacgtgtgccattctgtgactggtcaggggcacctggtaaggtgatctgtcatgttcacaagggctcacttcgtcagctacctgagctataattcacatccaaagctatggcttgcctgccatgagaaacctagaataacaacaagaatatcctgtgtgaatcctcctgcatgtgcttcctggtcctcttgagcttatcgtgtcctaagttgaggcagggtcttcactggctcattttatgcctggactgtgtttgcaggtgtaggattatgaaggaggtctgatgatgccatttggtgctctttctttttgtagctatggagggcctgggctttctggatgctcttaattcagcccctgttccaggcatcaaaattaagaagaaaaaaaaagtactgtcacctacggctgccaaggtatgggctcccagaagtaggtttcagtgacagagtataaaaggtaaagtagaagaaagggcacagcagctaggagttgtcggggaggacaacaagaggcgttttgccttggatatagactggtgcaggtgagacattgtggagacagagtcttcctttatataggaactgttgggggactgtgcctgggaccctggactaattgccttgcccttggctttccagtcagttcattaacttccttttctttcacaatagccaagcccctttgaagggaaaacgagcacagaaccaagcacagccaaaccttcttccccagaaccagcaccaccttctgaggcaatggacgcagaccgtccaggcaccccggttccccctgttgaagtcccggagctcatggatacaggtaatctagaaactggttcagtttggggggttttctgaaaggagggatctgggtctgaaacctcttctgcttccagcctctttggagccaggagctctggatgccaagccagtggagagtcctggagatcctaaccaactgacccggaaaggcaggaagaggaaaagtgtgacatggcctgaggaaggcaaactgagagaatatttctattttgaattggatgaaactgaacgaggtaagaggtcatttcctacgtaataggtgtgtttaagggattttgaaaggacttggttgtgcttactttccctcttgcttttcttcccctgccgacagtaaatgtgaataagatcaaggactttggtgaggcggctaagcgagagatactgtcagaccgacatgcatttgagacagcgcggcgtctgagccatgataacatggaggagaaggtgccctgggtgtgcccccggcccctggttctgccctcacctcttgtcacccctggaagcaatagtcaggagcgatatatccaggctgagcgggagaagggaatccttcaggagctcttcctgaacaaggagaggtgagcagagtggggttcgtgccctgggatgttgagtgcttggacactcctgagggaacatgagctggggtaattacggggtggaggttagaaattactttcagggtctgaattaataacttgactatcattcttttttctctcacctgtgttgttcctgatagtcctcatgagcctgatcctgagccctacgagcccataccccctaaactcatccccctagatgaggtaagtcaatgttctgtgatgatggaagttgtgatggtcattgaattcggtgcatctttcatatgagaatgtctctgttctgtcaatcctgattttttttgttcttctttcaggagtgttccatggatgagactccgtatgttgagactctggaacctggggggtcaggtggctcacctgatggggcaggaggctccaagttgcctccagttctggccaatcttatgggaagcatgggtgctggaaagggcccccaaggccctggaggaggaggcattaatgtccaagagatcctcacctccatcatggtacgcaccctccttccccttttccaccttctgtggagcctccttaagctcgctctcctcactgtctcccattcgccttaccccagttctccacatctacccacttacccctaatctttggcgctatctttcgccatggttgttaccctttctgtctgttgactttgccttcttacatcctcacagggtagcccaaacagtcatccttcagaggaactactgaaacaaccagactattcggacaagatcaagcagatgctgggtaatcttcagggccagccccaggggactgggggaggaagcctgcagtggagttgggggaagcagggtttcaaagatgcagaagaatacagggctgtggccactaggcaagaaatgggaggggaagactggacagagagagcattgctctgccaggttggtttgagagggtcagttggttgcacctaaatgggagatcatgctagtcttctagagtgctcatgctgtgttactcttgttttcattaacagtgccacatggactcctaggccctggcccaatagccaatggtttcccaccagggggtcctgggggccccaagggcatgcagcactttccccctggacctgggggacctatgccaggtaggtggtgagtaaaaggttggaatgggcttatctgcttaatttcagtctgataatagtataggattgactggaaggtgggaggtggtggtttaggttgggagatggcagttcctggtagctgatactgtctctcttttttgtccccttacaggtccccatggaggccctggtgggccagtgggtccacgtcttctgggtcctccaccccctccccggggaggtgatcccttctgggatggcccgggcgaccctatgcggggtggcccaatgcgggggggtccaggaccaggtcctggaccataccatagaggccgaggtggccgaggaggaaacgaacctcctcctcctcctcctccattccgaggcgccagaggaggtcgctctggaggaggacccccaaatggacgagggggccctggtgggggcatggttggaggtggtgggcatcgtcctcacgaaggccctggtgggggcatgggcaacagcagtggacatcgtccccacgaaggccctggcggtggcatgggaagtgggcatcgcccccatgaaggccctggtggtagcatgggtgggggtggaggacatcgtccccacgaaggccctggcggtggcatcagtggtggcagtggccatcgtccccatgaaggccctggcggaggaatgggtgccggtggtggacatcgcccccacgaaggccctggcggaagcatgggtggaagtggtggacatcgtccccatgaaggccctggacacggggggccccatggccaccggcctcatgatgtccctggtcaccgaggccatgaccatcgagggccgccacctcatgagcaccgtggccatgatggtcctggccacgggggagggggccaccgagggcacgatggaggccacagccatggaggaggtgaggatgctccctgtcccccatatgccttttggttgtcccatacaagcttttggggagtgggtgagagtcactactgttggtagctaggcagaacgtgaggtacccgtctctttgatgtcctagtatgcatagcagttcctactctatgcccttcccccaaatccccaagattgtctctgaaagacagttctcaggatgtcatggacaaggggtggtgagggtggcattgccctcagctatttcctgtctaactgttttgccatcgttcccacagacatgtcaaaccgccctgtctgccgacatttcatgatgaagggcaactgccgctatgagaacaactgtgccttctaccacccgggtgtcaatgggccccccctgccctagggaccatttgcctgccctgttcacacaacccctgtggactgcagcctcgctctttccaccctgttatggcttctgtgaggcccattttcccttttccccagctgatgaggagccggccccctcagttcccacttgcttgggttcctgggggttttctgatcactggtgcgcattgatgtacatattttcctccagtctggggaggagagagactggaaacgttcctggactgctgaagaggagacccagttggcttcactttttgagaagattcgccctgtaccccaaacccctttccagtattacccttaatgcttgagaacctaaagctggttatcctggcgaacacccctacccttctattgcgggtccccacatgcacacagaactctgacacaggatcagctgcacttaagaaatcatcccagctaagttcattattcctcatggggtggggagatgctgaaaggggtattgtatatcccactgcactgagagggctcaatcagctggatttgagttctggaacacacatcatccccacccctcccccagcgtgggctcaccattcttagtcctttctcaagtgggaccttcaactttctgtgaacacccagtctgcgtcctgggtctgctaggttcgatgatggcgaactcgtatctgcatccggtgcaagttttagctggcagaggtgagaccggtggtgctggtctgcctttgccaactatagccagtctggagacttgataaaatacttcagtgagaccagcttctcatcaacttgggcccggcgtgctgggcctgaaagtcacactacatgcactgcctttgggagtcagctcactccctgctcccacctggaaccttgccagcgtgaaggaggcttccaggtacttcaccctgtcaaccacctctgaatccccaccaggcgccttcctgggtggattcaacaagatgattttgccctttcccagttctctccttcactttggcatcagttgttttctatgaaaacagtggattggttgggttttgtgcagggtcttgggttagagccaaaatggatttgaggatgagtatttttttttttggttttgtatattttgtacattaataataaacagtggaaagagaagcagcttatttaacccctagtgtgtttggacttttttgagacggagtctcgctccgttgcctgggctagaatgcagtggtgcagtcttggcttactgcaatctctgcctcctgggttcaagggattcttctgcctcagtcttctgagtagctgggattccaggcacctgccaccatgcctggctaatttttttgtatttttagtagagacttggtttcaccatgttggccaggctggtctggaactcctgacctcgtgatctgcccgccacggcctcccaaagcgctgggattacaggcgtgagccaccgcgcccggcctggactgtttttcattttttttttttaaaagccattaccacctgtgttagatacattagtacaaatctgtggaatctgatttttactcctctggagctaatgcttgatctaacagttgctattaagtactggtgaaaaaatgcttcaaaaagtacataaaatactctaggatacagagtagatctcggccacagggctctttcctggttttcatctttctgagtcttctttaacacgcctcgtgtgtgttcctagaacagtcctatcctggctatcgtgccctctaggatgtgttcttggtcatcttatccacattctacagataagggaggaa

SEQ ID NO: 22617 - DNA, 14468 bp, Homo Sapiens
tctaaggctgttctgatctcttcatctgtcccttcacctggcccctgtacccccttcccctttggaccccttgaaccctcccaggacccccgctcagccccttcccgcccccaaccgactcttcccgaacgtcccttaccaaccgcgagagccccctactgcgctttggccacaccccctacgcctcgctcccggccccgcctctgcccctgaccgcgcctgcgcaaggcgggcgccctaaagtcctatttcactctgttgggaggagggggaaaggtgtacgcaggcgcagtggcgtctaaatttgggcccactaaatgcgtcggagcatctccgcgcccaggcggctcctcctcactgcggcaacccgggaaaacttgtgaactaatcagaaaaagtggaaggcgggagatcttggggcgctgtccaatggcgcggaagagaacaaatgagctggccaatcgggaacggcacgggggcgggctcgctcggcgcgaagttcgggcccgggaattccgaaggaggggtaggcgctgcccgcgcgcagaggccgcgcccctcctggccccggcttcttggctgtcaaacagatgcagcaacgtcggctcctgccgaggagcccaaggggtcccgggatccgccgcacaggctggcactgcttgaagaggaggctactcggagactgcgccgcgcgggtagatccgaaacggggctggggcggagtgggaaaaggccgggtatgccttgcatgatcgcggggagctccttcctgtttttatcccacctagagaagccgggaagtaggggtttaggtccaatttgttggagtacttaaggactcgtttgcactttcttttgggggatgacagtggattcattgccctcggaggttcaaccagttatgagtgagggattggccagaagatcggggcgcaggcaagcaggagtgctctattaggataagcaagtttgacaggaagaagctgctcttctccgaattacacagaggtgatgtgttcgtattgcacgtagacgtgtgtataacaggacctccttccccgcgccccgccaccccgacacacacaggagctgcctaaagtatccttgccttgcagattggaggctccccaaatattttgtgatctgaggatccagctcaagtgaggtgccataggacgtgttcctgagtttgcattgcacggagaccttcctggaatttttcatttgcaagtcggcttaaccaattttgcattgagtcctaggctgcttgcactctgaatttgggctattcaggtagtgtgctcaaagttgaaaccgcatacagcacaactcaagtttgcatcagactgggaagcgaacttaagccagcggtgcgtggcccaggagtgggaaaggaaatggatgcctgaagtggaagaggtggtgcagagggggcaccgcccatgctgccctgcttccaactgctgcgcatagggggcggcaggggcggtgatctctacaccttccacccccccgccggggctggctgcacctatcgcttgggccacagggccgacctgtgtgatgtggccctgcggccccagcaggagcctggcctcatctctgggatccacgccgaactgcatgccgagccccggggtgatgactggagggtcagcctggaagaccacagcagccaaggtgagcattaagcagggcagctttgcccctgggtggttgaagcgccaggctggaatgagtaaggtctccacaagaccctgctgcctgcctcccatactcccatcagattggatggatagtcgtggtccagaccttcatcttcccaccagaagtgtgcacagtcagaagctctctgccagactgaccctttttggtcccgtttagctcatacaggacctgggatatcatcagaaagatatcacagtggggatgttctgaggccactagaggccaagtttagacttgattcagtttccagctttgctgaggcactctgttcctgggttagggcagttctatgttgaataatgtttttaataatctgggcatgtctttctccgtgacttgaggcagttagcctcagaaagcctagattcacatttgagttttgccactgcctcttggtaaagtcagctgtaggagtgttatggttattagactatagtagccaacattcatctagtgcttactgttatgagccaggccctattttaagtgtattgaatgtaggtggtactaatattatcctcatttacagtaaaggaaaatgaggcacaaagaggttaaggaacttgtccagggctgggcatggtggtttacacctataatccagcactttgggaggctaaggcagggtggatcacttgagctcaggagttcgagaccagcctgggcaacatggtgaaaacctgtctctaccaaaaaattaattaattttttaaaaaaagcctgggcgcggtggctcacgcctgtaatcccagcactttgggaggccgagatgggcagatcacgaggtcaggagttcgagaccatcctgaccaacatgttgaaaccccatctgtgctgaaaaaaaaatacaaaaattagccaggtgtggtggcgtgcacctgtaaccccagctactcaggaggctgaagcagcagaatcacttgaacccgggaggcggaggttgcagtgagctgagatcgcaccactgcactccagcttgggcgacagagcgagactccatctcaaacaaacaaacaaaccaaaagcttgcccagggtcacataactggtaagtggtagagctaggatctgaacgagctggagctgggggagagtgagcatgtttgaaaactggaccttagggcggggcacggtggctcacgcctgtaatcccagcactttgggaggctgaggcgggcagatcaggaggtcaggagtatgagaccagcctggccaacatggtaaaaccctgtctctgctaaaaataaaaaaattagccagacgtggtggcacatgcctgtaatcccagctactcaggaggctgaggcaggagaattgcttgaacctgggaggcggttcaagcttgggcaatagagcaaaactccatctcaaaaaaaaaaaaagaaagaaaaaaaaagaagaaagaaagaaaattggaccttaggacagtgagggcagggatcctttgtaggaaagcacaagaaacacagacttgttcctagctgacaaggagtgtactgcctggtacctgtcacctgctgaggggcttaggatgtgagggagaatctgactacagtttcatattcttccccagaaatcatacagatttctccactcctgactctggtcatttctgtttttgtcctccatatttgcctggtgccccaccatcaacaggtactttggtcaataatgtccgactcccaagaggtcacaggctggaattgagtgatggagacctcctgacctttggccctgaagggcccccaggaaccagcccctcggagttctacttcatgttccaacaagtacgagtcaagcctcaggactttgctgccattaccatcccacggtctaggggagaagcccgggttggggctggtttccggcctatgctgccctcccagggggctccacagcggcctctcagcaccttctcccctgcccccaaggccacactgatcctaaactccataggcagcctcagcaagctccggccccagcccctcaccttctcccctagttggggtggaccaaagagcctgcctgttcccgccccacctggggaagtggggaccacgccttctgctccaccccaacgcaatcggaggaaatctgttcaccgagtgttggcggaactggatgatgagagtgagcctcctgagaacccgccaccggtccttatggagcccaggaagaaactccgtgtagacaaagccccactgactcccactgggtaagtggagtcctcacttggccctctcagtgttttactgcttttcgattccttgtatccctaggctgtgaggaggtccccctgcctggggggatgggcacgggaggtggaatagatggaatggcaagacctgggttagctctgataggaaaagaaaaatatgtgcaggagaacatgagaggtggggtggggcagtgcttataaaacaaccggagtgagcatgtcctgctttttacattcatatggctttaaccccattcttctagtgcctaaggatggggaactttcaggctcacactagaggtttttaggcccaccctatgtgtttttaaggacagagtccaggctcaccttagttctcagaccactgtgcctctgtggcctcaccctatgaccagccatagggtggcaaggtctaggccttctcctacaggtttccggtgacccttgtgtctgtgtcacttccttcagaaatcgacgtggccgtcctcggaagtacccagtgagcgctcccatggctccccctgcagttgggggcggggagccctgtgcagctccttgttgctgcctgccccaggaagagacagtggcctgggttcagtgtgatggctgtgacgtctggttccatgtggcctgtgttggctgcagcatccaggctgccagggaggccgacttccgatgcccagggtgccgggctggcattcagacctaaggtccaccgccaaggcaccatcggacacacctgcccatgagtagacacagcagcgagcaaataggtctgataaataccccccttcccttccctccccaagagggaatgactacagggaagaaggatggattgatgtggactcattcagggcctggagcagaccctggtggccaagacagaagagatggtttcctgccaaagatattgccacctccaggaaattgccagtgagctggaagttcccactattacaagccataaggccatgttgccatggacaccagaatatctgtagtcagagcacctatcagttgcaaaagccatgcctgcaaccgatggaaaatgtaagagggagttcttaaggttcttggtggcatcacccaaggcattctgggaaaacctagggcctggccccaaaacttccctactctgtggctagtcctgctgccaacaaaatcgtagcgacctggcttttcacagctttgcttttatttccaagtcaaggacaagccgcttcattcactcctgggcatttactcttcttgtgggtctgtgatattccttgctttccagggagaatgtgcttggcaaggtctggagaactaattcagaatcttaggggaaggggagagatggaaatacaaacctgcttactggaaaggtgcaaatatatgggttgagctggaggtaggaatacaggtaattaaggtttctagtttaagggaaaacagatctattgccatttaaataaggtaactgggatttggttaagttcacaaagatagcagaagatttatttacaggcttcacctgtactgtcagggcaagagaaagcctggtaaaccagctacagcagtttaccagtgtgatggctgtgacacagctccactccacgggtggacacagcagagggcaactgggctggcctggttcagtgtgaatcaaaccgcttaacccacacatggtacatgtgattttcttttgtgagccttacaccaagccaaactattgtcaaagcatcatttctatagaaataaagccttatcttgacctgttctattaaaacctgccacatccgccctttcctacctagatttaatgagcccaagtttttttacatggaagaaatgactctggggcaaagacccctaatgaactagtggcagagccaggaataaaacttgagtaactaatgagtcacttatgggcagagtatgcaaaaaccttaagtggaaaccaaatagaccctggtatcaagaaagcacaaagtattaatagaagtttctggttggggtgatctaggttcaacagaaataagatgatttctaagtataaagccatttaagaattccagagtagggtgggaaagcaaaaagccagctctgaacaggtaacagctacatggtgactgagtctatgggcaaaagttcttgcatcacaggcttttgggaactagcctatcacagggccctgtacaaataaacttggctgcaatcccagctctccctctgatgttgtgtgaccttaaggagtgtaaatggcaccttagtttcagggtcacttgggtatgagcattggatattcccatccccacctcagtaactgaaggacaaaccaagataagtgtgtctatctactgtgtcccaagcttctttatttaagaaaaaagtgatacatgatgtgggattaaaatcaagagcatcattgaacttcaccttccctccaaccagttgccccaaactcccctgcccccaccctttgtgttcccaattccttccttagtgaatgaagaacttaatcccaaaaaccctggcacaaactccaggttttctttccctagctcctcccctccccctgtcccccattcctagaagggcaggcacctcagtttgaatgcatgggagagcccagagtggtgacagagacagggggaaaggcttccccctcagggaaagggaccgaggagtacagtgcagtgaagtgagggctcccatagcctggggtaccaaaatggggccctggggccagaggaaaggacactggtccccctgagaaaggagacccagcagcctcaaaatcctctcgttgtgcatagtcgctgcttgatcgcttgcccttctggcgccggttacagaaccacactcggaccacctgccagtgaatgacagaaaggagaatgacattagacaatgagctgagagacgggcctgactctgcttggacattctatccaaagccaacagccctagagcagttagaggaggacattagagaatgagctgagacaggcctgactgcttggacattctgtccaaagccaacagccctagagcagttggaggagccagagctagggaaagcgaggtggtgacaggggaaagagatggagcccgcagagagacatggcactcacatccttctcgagcccaagctgctgggcgatgtggctgatctgctgcagtgtgggtttcgggcactgcaggaacaaattctccaggttgcctctcactcggttctcgatactggttcgctttctctttcgggcctgcacgagggtttctgctttgcatatctgtgcaggtgggaagggggtgacaagggcaagctttggacttgctgagtaacagcatcacaggggtctgtgactagatgtgtcagcagagccaggtggtggtgtgaaaaggcaggatcctggaagggttggctctggaccttatcccagcagaactgaggaatttcactccatcccactgagaaccactgcaccaaagacggagagctacgagccagtgatggaagcaatggaaattaggccaagaaagggaaggtccccgggtatccccctcccacccttacctcctgaagattttcattgttgtcagcttcctccacccacttctgcagcaagggccgcagcttacacatgttcttgaagctaagctgcagagcctcaaagcggcagatggtcgtttggctgaataccttccctgggggaggccagtcaaaagagaagcaaaatgagggagcacgcagggcccttgtgaccctgagatccaagcttaccacctcttcccagagggagctcaaagcccaagcatcttctccctctccctactcctcttcatgggtgagggtagagtctgcccctgcccctccccactaggttcagggatactccttagaggggagatgcggtcagaatctgcagaggggaacccaccaaatagaacccccagggtgagccccacatcggcctgtgtatatcccagggtgatcctcttctgcttcaggagcttggcaaattgctcgagttctttctgcagagctttgatgtcctgggactggattttaaaaggcagaagacttgtaagaacataaacacaccagttatcaatctcccctttccattcgggattcaagaacctacgtgtggccccaaggaatagtctgtagaagtgcatctgccttccaagctgcccacctaacttctagaaataacctacccacaaatgtcattcacccattccctgttcactgactcatgcatgtaacaaaggactactcttcccccagaaactggcacatccaagggatgcagagcatggtgaaaggacagaaagagagaccctggcctcgaggagaacacctgtcaggttatgaaggttagaagttctttgctgggcgcggtggctcatgcctataattccagcactttgggaggccgaggtgggcagatcacgaggtcaggagttcaagaccagcatggccaacatggtgaaaccccgtctctactaaaaacacaaaaattagctgggcacggtggcacgcacctgtaatcccagctactcaggaggctgaggcaggagaatcacttgaacccgggaggcggaggttgcagtgagctgagatcacgccactgcactccagcctgggtgacagagcaagactctgtctcaaagaaaaaaaaaaagaagatagttcatttaatacctgcaaaattctctcactcaagtatcacccccagtttaaggatgttttgagattagagaaatagataagctgctaagttctgggttaattaaaaaggaagagcatcatgtctcagaagctaaattcagtatatactctccccagcttgctttgagggtcccacaaactataacatggcatgcatacacacaaacacagcaaaaaagtaacaggtgtcataagaatggataaagtgctttgtgtgtacttactcctcattttttaaattgattatccctcatctttactgtatctttttcactatagaggcatcctaattgatttttaaattcaagagatttatcgagcaccttctataagccagcggctatacaaagtggacaaagagccctgacatccagcatgacagaagtgctattcggcacttgttcttcaagttgcccacttggatctcttccaagtgcactttccttttttccctgccctataactttttaataataaacttccactcctgctctgaaaaataaaaaagtaaataaaataaaaaatggccaggcacagtggctcatgtctgtaaatcctagcactttgggaggccaaggtgggcagactgcttgagcccaagagttagaaagcagcctgggtaacatagtgagacccgtgccgccccttctcccacccctgctgcctctatttaaaaaatatatatatattatggaaaaaagcaaagcagtccgggcgcagtggtcatgcctgtaatcccttcactttgggaggccaaggtgggtagatcacttgaggtcaggagttcaagactagcctggtcaacatagtgagactctgtctctactaaaaatacaaaaattagctgggcatcatggcgctcccctataatcccagctactcaggaggctggggcaggagaattgcttgaacctaggaggtggagtttgcagtgagccaagatcgcaccactgcactccagcctgagggacagagtgagactccatctcaaaaattaaaaaaaaaataaagcagtctataggagtagggtaaaggagggaaggagattatggaggagggtgacacttttaaagacagagaaggtgattgtttgagcaaaggacaagagtctaatgtggcaaggccctgaagtgggccttccagagcccaaagctggtctggtggctaggtagatcctgttgcagacatagtgactttgttttagtccaagtgaaatgatctctcaccctttttctccccccccaagacggaatctcgttctatcgcccaggctggagtgctgtggcgtgatcttggctcactgcaatctccgccttctgggttcaagctattctgcctcagccgcctgagtagctgggactacaggcacccaccaccatgcccggctaatttttgtatttttagtagatatggggtttcaccatgttggccaggctggtcaggagacctcaagtgatctgtccaccttggcttcccaaagtgctgggattacaggtgtgaaccaccgcacctagcctcacctttttttttttttttttgagagtttcgcttttgttgcctaggctggagtgcactggcgcgatctcggctcaccgcaacctacatctcccaggttcaagcgattctcctgcctcagcttcctgagtagctgagattacaggcatgcgtcaccacgcccagctaattttgtatttttagtagagatggggtttcgccatgttggtcaggctggactcgaactcccaacctcaggtgattcgcctgcctcggcctcccaaagtgcctggccacaccttttaaaacactgactctagttgacgtgttggccacagacagtagggaggaagcagtataatttgagaagctactgcggtaatcccagcagagatgatggtggctgaggccagggttaggttgtgattgattcaggatgtttcttaaggataggatgtaggacgtgaaagaaactgaggatgactgggtttggccttgagcaactgggtgatcagggtggagcagttcagggagccatcacaagagacagaaaacgcggtagtcatctggtgtctaaatggcatttaagccttgagggtgggtgagaggaaggaagggtagatagagcagaggttgaaggactgagccctggggcatgccatatgaggctgccggcggacagaggtgcacagctagtgagaaaaaaacaaggcctttttgtagtcctgaagcctcaaggaagtgtttcaatggtgcttgatcatatcaatttcaaataggctgttttcatccccaacttctgctcagccaataactcaaactgataaatgccctctgctatcctggattttccaaattctgttttggggttttggaataaacactggtccaaatcctcgcttcatcatttagcagttaaaacccgttaaataggataataatacctccccctaggagattttgtgctggttaatgagataatgatgtataaacggagcacacagccaggcacttaggaagtggaccacaattgccagccattatcattcaaggctcagcagtgacctcctgcgaagaggttggggcttctcggtcactccagaaaccagtcacacctttctgtgaggtctcaaggcttagtatttaatctctaattgcttacacttgtcgccttggaggactggaagatacatctttaatagtcctcagcagggctggatgccttcaatcccgcagcagctctatatttgcaaatggcctggagaaatctctcaccatttttcttgtttacaactttggaactgaggctgaagtcaatcaaaatccagctttctacaaggggtgccagggtgtgcaccttaacacagtggccagtcattggcctgaggcagagatccggggaagacaagccctatacttgactggaggtaaacccagctcacaacgcgcacacacacagcccaaacaggagatcctatcagaaacgagtcacaccctagactttcaggaacaataatcctggaatgagcactgtttttaccctcaggctatgcttaaccctaaggccaaaatcttgggtctgataagggtcaaattttcaagcaggactaagggtgggaaaaggggctcaaaccaaccccaagctgggtctggtgctgggccagtaatgagtgaccagaccctgggcaggcctaggagatgtgagagaccctgacaagggctgggccagacagagcaaaggccagcctgggccagcttccgactctcccaggccgctctgccctcacctgcagttgtctcttcgaaatccagcttccagttcccacctggcccctgcctgccagggctgcctgcagttgatacacacccctccctggccagggcagctgaccctgcctgctcctctcctgggtgccaggtctgggcagctgcaggtgaccacttccccatcaggctgccctgtcatgaccacctccccacaccccaaccccgtcgaagctcacttgcctcctccgggttttgctccagcttctccttctccagcttcacggcaccaggggtgacggtgcagggctccggggaggccccatcggagttgctctccaccccgactcctgcttcgccctcaggctgagaggtctccaagccgccttggggcactagccccactccaacctggggcccacagtacgccatccccccacagaactcatacggcggggggcatgggggaatcccccacacctcagagcctggcccaacccccggcccgattcctggccctccaggagggccttggaagcttagccaggtccgaggatcaacccagcccggctccggcccccctggcccatcacctccaccacctggagggggcgagaaggcaaaatctgaagccaggtgtcccgccatggggaaggaaggcgccccaagccgggggcctggtgaaatgagggcttgcgaagggactactcaacccctctctccctccccagtcccacccactagccttgacctctggccccgccccctggatgggtggaggagagggaggtggggggagaaactgaggcgaaggatgtttgcctaatggtggtggcaatggtgtctgtggaaggggaaaaccgggagacacaactggcgcccctccaggacctcagtgcaggtcccccacagaaactttttttatttttattttttaagacagggtctcactttgttgcccagactggagtgcagtggagtacaatgatggctcaatgtagcctcgatctactgggccaaagcaatccttctgctccagcctcctaagtggctgggactacaggcttggaccactgtgccctgttagtttttttatttttagtagagatggggccttgctatgttacccaggctggtcttgaattcctgtcctcaagaaatcctcccgcctctgccgcccagtgtcatgattaaaggcgtgagccaccacacccaactttcaactcccaacccgctccctggcactctctcaggctctgcacatcccagctgtctggaatcactcccacacctccatgttcttcaggaacccaggtgcttgaccccctctccacagacctctggcactgtgccttcaggggccagtcaccctctcagctcctcaaatttattgaatgtgtgtgtggcgctatccctcaatgcatcaacagccataagcacaatggccagctgctcccttatgccttcccccgatccatccagaatcctaggcattcccatcccgatactggccaaatccagccaccccgcagcctgggtgcctggcaccatctgcccagcctgccaaatttcaccccatcttcaagagtagactgccagacaaggcctccgtgctatatccccccaccccccatccccccacccctccgtcttccagaatcagactccagactctcctcatctaacagactaaggggttggcccctacttccccttcaagggaccagactttggactgattgggcctcagtttcccaacctttgctgaaacagagtgataagacacccgctttgggccccctccactatggaacctgcacatcaggttccttgctcccctctcaaccaaaactcagacatctaataccacggtaggccccgttctccctcccccacctccctggcccaggcctccagccctaggccctgggtggggaaaaccagggggtggggggtgtggagaaaaaatatctgacttcaggttcaaagaagcctgggagggactgggggaagggggcaggacaatggccttggctggacaatcccggtccccagagggggcagctctaaccctaaacaagtgctcaacccttgaatgggcctggatggctcccctggggactgcttcctgctccccaaccccccagtcccaatcccctcacacagaatccccttcagagacgctaaaaggagctccagcaacccccctctgcaatcccctcaaagactgagcctcagacgggcaccaagggccccctacagggacctaggtatctagttcctccttcctctgggggactcaggcgtccagcttcatcgtgcatccctccccgagcccggaagattgagggatgtgctttgtttagtggggctggctggcagaaagacgcagaggaggtggcgagtgatttgtggaggggtgcaggaaggctgccctaagctccccttcagggtctgtttttctgggcctggcctgagtatcctgaggctcatgctgctggtctagtgcttgattctgtttgcaagagaatagccaacg

SEQ ID NO: 22618 - DNA, 30911 bp, Homo Sapiens
gggactgttgacaccaaatttaaatgtgcgaataggaatgactatgcagaagaggccaccaggaagagggacagagagaaatgagactccaggcttgatagaatgaccttgggctggtggaagaggcaggtgctgaaaacaggcatggaaccccttgccctagggcagggagaaaccaagagagtccaagctgggaaaagaatcaggtgaggaggttgaggtgttgacgaagggagtgtgcttggtgatgggaaaggtgggctctgaggaaggtgttccaggaaggacttctcagtgtaggatggagccttatggcagacgctgggaccgggcatcttctccagaaatgcccatctgccactcaggcaggcaggcaggcagctccctaccccttgagttctggtgtttttcctactcctttctcccctcccacaagctgcccaactcccagggacctgactggatggagagtacatacacctggaccactgcaggcatggcacagggaagagagaatccagacccaaatcacctccaacccacacctgctgattcttccgtgcttttgtagcctgacccttcgctgccgtcactccaactcctgtgtgaggatgttgagctcctgggaaaaccgaagggagggcaggagagacaatactgtgaccaaaggctgagactgtgtcatcacttgggaatgaaagcatcaaatgccaccccaggtgggattgttggcttcaaggtttttttctccctttcctttctcccttttctcttttcctttatcgaggtctgctatttactcagcaactcttcaaagtctgtggttctgtgggacacaatgtgctaaatgatgcctgtaagggaggaggtcgatgtacctccacttccaagaagcttgactttccggggaagaaaagacaagtgaagcgtagacattgcgacttttggcttcctgtttctgtgagttgcaaggaatcctgtccacctggccctggagccgccttctgggacctcatccttgccccctgctgcaggtgccatctcaattagtcctgctgtccctcctccccctttcagattccagcacaattctggaacagctctcccacctggccggggtgagactgaggctccaccctcaagcacttgggcactgatcctttgtgaaggatggggatagcaagacagcgtctgcaggggcccctagagggccgtggggatggctagaaaacaggaatgaacagactcacttcagcttatgcccagactcacttcagcttatgcccagaaacaaagaaaccaaggagaagcaaattccataagtgcttttattttattggagatgagcaggggaggcactgaaaagtggggatagtgctggaaacatgctgacagggcctggattgagcccacacagcaaggggcgggagcaggactctaactcccaatgttgggtttccctctatcgtgctctagccccactgcaacctagggcttggaggattagggaagccagctgggatgttccaagaagagccaggagggcggaggactccaggaggaaatgggttattgatacctgggtatagatgaatattcccccagctgcctcctggataccgattaatattcccccagctgcctcctggataccgattaatatttccccagctgcctcctggataccgattaatatttccccagctggtacctgggggttgattattgataccccagattccctcagggtgtggcatgggcctcgttccccaaccagtcccagggcctccacctccccaggacacactgggattcagggtaccccaggggtgatcaggcagaaccctgtggatgagagaccagggagggcgttgggaaaggatttttcccccggctcccagtgaattagaacggggcagtcgtctggactccgagtcctggtggaggagtgaagccttgggtgagaggcctgtggcatcgggagaagactccccaggcaaagggccactgcccggagcgagggccgcagcactggagaggtaagagagttcttcaggcagcgcttcccccaggcggtcctcagccgcagcagccatcatctgccaaggatcctcagggggccaggaatccatggcaggcagcccccacgatggaggccacctctgcactgcagaacctcctgcaggtgggaagccatctgatgcaggcacgctgagcttcagaggaacccttgccaagtcattagacctagggtccagagcgggctgcggatgttcagagttagaggggccagtggaggaaggttgtccgagctgaggcaagttggtccccaagttttgggaaactttctcctccacaacaccgatgctccgggcaaagaggcctgagggaaagggaagataaagcaaccagtggtctccagtccccgagtccccagttccctttgcttcccctatgcctattcttccttttccctcagggacctaaatgtgtaccctcctgcctttacccctttccttaattcctgtttcctgggggacctccagtccctcctgcccaagggcatcacggcctccatacctgggagatgaagacagaccaggagcaggcccagaggagcgcagctccctgccacgcggccctgcatcctgctcagcacccgatctccctcagccccaagacagccagccctttatcctggtagtggggtgggggacagcagaaacaggctgggctagtggttgtgaagacaataaacctccacattccaccctcattcctaatgtggtctgtggcaacaggtgtcacttgaatgaatgtcccagaggaagctgggtgtctcccgccctggctcctttccttgacctccctgccccttcttggcccaggtgtcctggctcacagctcatccctggttgccagcctccccagccctgcttctctatacacaaggacctccaccctggggtcccactctcttaattgcctctctcagcaacagaaacacttgtttctttttgggagctggattgtttcctcccagcacccctttctcatgcatcctcatatctccttcaccttggccccaacctgcaggaggttctggggtgcagaagtggccccatctgaggagctgctcctacatgagaccctggatctagctagggaaatggacctggatgccatccttatgagatactgactaattcctgctgctgcagtgacaaattaccatgaaccgaatggcttacaacaacatggatttattactttacagttttggagatcagaagtctaaaacaggtctcagtggattaaaataaaggtgtcagcagggctgtgattctttctgggggcctcaggggaaaatccctttccctgctttttcaccttctagaggcatcctgtgttctttggctcatggtccccttcctccatctccaaagccaaaatcagccatttcttacactgtatcactcagacttcctcttctgcctcccatgtccacattaagggacctggtgactacactggacccacctgaataatccatgataatctctgtgaagtcagccgaatagcaaccttaatcccatctggaaccttaatttccctttgccatgtaacctaattcctacgttccagggattaggatgtggacatctttgatggtgttggggttgaagacatcattctgcctgctactggtggtcagatgtgccacagagtataagaaaccttgggagaaagtggctatttccaagtaacagtagaggagagcctttaaatgctgctgtcaaatggccaggacttgatccttgttgaagctgggcgatgagaatgtagagattcattaacagtttgttggcttttaaatatgtttgcaaattttattataaaaatgcaatggctttgttctctccatggcttccgggaggccccaggagtaggcttccctggctgcccaaggtctaaacatgagctgttggctgattctactgctgtgtcctccccacctgcccctgctggcttaaccactggaggagtgaagagctcctctccagaactggcagtggatggagcccagaggcctttttggatgacatgcatgagttttacacaagcttttaatttggagcacagcaggagactcgaggaaacaccacatcagagagccttctctccctgcaattcccattcatgaagcatctgaggacctcgattcctgccattggctgcagatcaggggccagatgctggaccaagggtgattcaatccctttctggtcaatgtaatacatttttgctgattccagacttggagtttcaacagttctaaattcaggaccagacagcaccaccctgataggagggaatgggttaagtgctacagtaggggtgaattcctttgcagccaagcagaggctctgagaggtggcctggggtggggggtggggctcctacagggacaagcacaatccactctgccctccttgggatgcgggaacttcgtccgcctcagcctctccctgcctgtctcaggacttaagtcgcatggaccccaccacacactccactttctctctcttctccagtggaagcgactcctctttcccactggggcactctgccttctcagccctcacctgagagccatgttgctcacactctcactctggaccccagcagagcagggagtgtgaagatggagagaccactggcagctctgttctgccacaggctgggcctcttgatctaggccagtgagtcaccctgcttggctgcactccctgccccgctcccatcctctcagtcctttactctctccacccccagctccaggaacaacgcccaactggcctcctactcagctgacaggaatctggttggagttgttgtgtcccagccttcccaagcttccaggtgtcccagaaacccaggaaatcgagactcatgactcccagagaggatggcatctagaaggtgaggaatgctaatggtggaagaaaaggagtttgggtggggaggggaggggaggggagggagagaaaacactgagggccctaaataaggggaagggggaccccacggtgaatgaggaatgggaagagaatggatttcctggagcaatgagagaggagggaaatggcggaaggatctgggaggccaggcaatctctgctttcagttcaacaaatatttattgtcttcctcctctgtgggaggagctggaaggtagaagagaaacacagcccgcttttgaaggaaaatgagggacacagagacctctagaggcgtaggaagagcaccacccagactctcagaggagacccaggactccaagaaggcaaaaagtctgcacctagtccccacagtttactgagccatctgtccaggatccagggacagcagggagcctgctccaacctctgagggtgccccagtgtctccctcacccagggaatcatctgggcactgagggaaatggccacaggaaggggctgagataagggccttgagaggcaatgggtgtgttggggacggtgatctaggagggcgtggtgagctctgtaatggagggtggggtggaattgggagcgaaagcccagtggcatattgggtgggttgactagatgtcgaagagaggtcagtgaaaagtggccactgtttccagatgatggtttgactttgctttatttggtaaaggggaagaggaaggtataacttcttcaggcgtcagaggtgctctgagagcatttcaggggtttcccagttgagaaggtgatgggggtgttactcaatggaccatttcaacacagtagagggaattgtaaggggtggtgatctggctgaggggcactgtggtggaatgggaatttaaacagtaggagagaatcaagagaggagctttgaatctaccattttgagaagaggaaggaggaaggggtgataagagagagtctgcaaccttagggtagtagagaaagcagaaccactcttttgggaaggagggaaactgagctaaccctatgcctgggcactggccttctcccatatgggatatagtgtatgtgcttgtttgtgcccaaggcatgcacacacacaacagttgacttatggactgtcgagtaactctccttggggtaggaaaacttcagggtcagctagctggggccccagaggcttcacttgggctaggatatcccggatggagcggcaggggatctttccagcactgctggagccacagggcttggcaccagcggagggatcaggatggggagagccatcggggcccccagtcagtgtcaaggaggagacagacatgcaagggtgaccagaagagctggacttgctgccacaaggctgaaggatgattttgccactcgattgggaactggagctgctgctgaaggagccggtgcctggtggggagcaggggctctgggaagcactgccgcagggatggtagggtgaaccggagctgctggaaatgctagaactgctggggactcgagaactggagggagagcagggtcccttggagcccgtggagccgcctccacagagctggaccccaccagtccccactggctggaacgcaatggccgaggaagctgccgactggctggggatgatggggttgctggagaagtatttgccctcagagatggggggcccagctgcaaaggaagggacccctggagagcctttcacagggttctctttggtgaagtagcccacaggatagattttacccttactgtaggtcatgcctggaaccagataactgtcagaggagccacccaccacctcgtagccaccataggatttgtctacagaggtgattgggggacagggcttgcctggaaggccaccattgctacaggggggaccttgaaccactccaggggcaccagaaccgtgctggtccaccaccaccaccacaggcctctgaccccctgacacagagtgggagctggggatgtaggggccagagtgcgagacgatgggccctccactgcagggagagtcggggatgtccgaactacagggacgctggttggagctgacgctttggccactgctggataccccagaggtttgggaagaggaagagctttgtccaggctgggaagggtttagtattccgcggtaagagttgtcattggttggcagagcagagccattccctacttggaagctgctgctgctgaactgaaagctgctgctgctgctcgaatgagagctgctgcttcccgagtgagagccgctgcttcccgagtgagagctgctgctccccagctgggaggaaccggatgcaccttgtagactagagccagatccggaggagtagctgacctgggaataccccgttcctggcttaaaagatcctgcagaaccaccctgggcaatgctggatccgctggagctaccactggagccaccaccagagcttctggcactggaaatggagctgccagaactgctggagccactgtagctactgaagccgctggagtcacccttcccagtgaggcaggggtcgttaggggaggtgatacgcgtggggtccttacaggggtctgagaaggtgccaatgctcttagccaaggtccctgtggaggaaagcagtggttagtaagggccaaagaggcttggcttcctccctcacctttctgccttatctcagtaatcggcctctcgggtttctcccaagcagagcgcagggagagtttagggatggagaaaggaggaagaactggctattgtctctaaaggatattgaggtggccgaataaaggcatttctttgtttgggaagggtgggcaaacaccaaccagaaaaatagaaaattacgtgccaaagtgagtgacctcaaaggaatacattgaatataagagggggctgggcacagtggctcacgccggtaatcccagcactttgggaggctgaggtgggaggattgcatgcgccccagagttcaagaccagcctgggcaacatagaccccatctgtattttgttttttaattaaaattttttttaaaaagaagagggaatggagaaggggcaggaacaaataggtctaaaagaaaggaccctgaagagacagagaattggggaaactgaggctctgaggagtccaggcgtaaattcttaggggaaaaatcctgggccagacagtgggaccagagggaagaagacaaaaggcaaaacaatggagggctgagaagtggagacacatatagaaggagacactggaaaaagacaaagctgggggcagaggggctgaaataaaggaaagggcactcgaggactaagatttggtcaccagcttcttcgtgagagcccaggctggggtcaggaatggaaaccctatttcctatctcagcactggccatgccagtaaagctgggtgggggccaggatgtggggtcactacctgttgcttcagaacctgctggtaccagtgtgtcaggacaccgcaccctgagccagccctgctctcgctggcccagcccagggaaccaggacgaaaccccacgaacctccgaggctcctggccacaatcagcttccctctctgagcacacctgcctctgtccagcccctcatctgacttctgctgccttgacttccctcagggatgtggagccacatctttccttatctttcctttcctttgctcaaaaccccaggcccaacttaccccatggttcctccatgactctttcacctgcgttccttctgccttccctagcccctccaggtcccacgtgttacaaacagagccacatactagcaagttactgaacctctctgagctttagtttatacattcagaggggccaaattttccctgccttcccacagcattactatgaagaaaactaaatgagatcatccacctggaagttttttcttcttttttttttttttttttttttttgtgagatggagtttcttgttgcccaggctaaagtgcaataacacggtctcagctcactgtaacctctgcctccttggtgcaagcgattctcctgcctcagcctcccaagtagctgggaccacaggtgcccgccaccacacccagctaattttttgtatttttagtagagagggggtttcaccatcttggccaggctggtcttgaactcctgacctcaggcgattcacctgccttggcctcctgaagtgttgggattacaggcacaagctatcatgtgcggccagatgttttagaaagtgtaaagcattatatattatgaattattactgccactcatcctgatccctccaccaacaaccagactgccatcctctgtgatgtccctgttctctcctcagaaagaaattctctgcatgcacctccacgccgaaccccagctgtgccaattcccttcagtcctctgcacgaatccaccatgcattgcctctctctttcgctattccctcagacaccaaccacccactagaccatgggaaggtcgcagaaattcctcaagggctataagtacccggtggtcaacaacacaggtccaggggttgcctggcctggggttgaaatcttggctttgctgccttctaatgcatgattttgagctagtttcctaacctctccgagcctcagtgtcctcatctgtagagtggaaatagcaaatctcttttcataccgttcttgtaatgatcaaaagtgctaatataggccgggtgtggtggctcatgcctgtaatcccagcaccttgggaggccgaggcgagcggatcacttgagtcaggagttcaagaccagcttgaccaaaatggtaaaaccctgtttctactaaaaatacaaaaaaaagaaaattagccaggtgtggtgatgggcacctgttgtcccagctactctagaggctgaggcatgagagtcgcttgaacctgagaggtggaagttgcagtgagccgagattacgccactgcactccagccttggagacagagtgggactccatctcacaaaaaaaataaaaataaaagttctaatatataatccaaatgtgcttaaaacagagtctagcatataaaaaggctctaaaaatgatattattactattaaatgtccaatcattatcttgtagtgctcccataataaaaatcaccaccaccatttatataaacctctagaatttccaaagtacatatcacatacattatttaatttgagacacacagactagaggtaggtgtcattaaccccacttcagaatttcagaaactggggctcaggaagtttaagaaacttacctgaggcgaccatacagtgaggagcaacccccagactcaaaaggcagattccagagcccctgcccgtccccttcgctgggtcctctcccggagtctccctcccgcctccctcctgttcccagggcccccagcctcctacctggcaggaggagaccagccagcagcagtgccatcatcccgtgcccacccacacgccccatccagggtgcccgagacgagcccatctcgggctgcacggcctcctgactgatggcagctcgaggacacctgggtcctttatgccagagctggacattccctgggcaggagtcactgtggggagaggaggagaggtggagggggtgggtgccccgggggaagttggtgtggccgggaggagcgtggtaatcagcccggtgcatctgcctactcagcagcagcagtggctgcagtgtggggtacccatggccacggggctctaacgatcctgccacctgacaggcctggccccggctcctcattgcctaacccggaaccaggcgctctgccccacggccacccactctggggcggccactcttgccacgggacccagctgcctggctccttaactctcctgcctaccgtggcttggcctgtctctccatctgccctccactcgcagtcgtgggtgtttcagctttttcttccacacttgggtgcccgctccagccccacccacccaaccccaatgaggtcccattcacagcccctgatctgctccttccttaggaccccatcactccacctccactttcctccttcaaatatgagttctgcccccatcccccaggctccccctcccaccactccccaagtaccaggccagccacatacctattacgtgttccatcacctggggaaccttctccttctcagaaatggggcaccacattcccaaaaccaactccctgacctgtcgcttctgggggcctctggggacggcatggtggcgggggtgggggggggtgctgggagccagggctcagccaggggaggggcctgggctgatgacctctgtcaaagctgggccttggttactcacaggccactcacagcccctccccatggctggtaacccagacctcaagggtgagcaagaggctaagaaggctaattgggaaggtggtggccccgtagcccatctgctggccctgggctggatgagcgagcaggaagcagcagccagctctgggcaggtcgaggagggccaggcaggctcccgggtcctcaaaggatgaaaggaggccaggagaaccggagccctgccatctgctgagagggtggtggcttctcctccattgcgttggcctccctcctgctctggcccctgccccgccccagccaattaattgctcactagtattgcgggagtatcagtatcggagggaggtgcctgcaagtccagcaagctgccctctcctcccccaggcctcagacacccctgctcccctcacccaaactcacttcccaaacctcatctcctcacaaaggcagctctgtccctgggccccttgggctggtctctcccattccctctacctcctgaccgccctttaagttcagaccagcaggaggatggaaatgtttcctgtctgtgctgtccgatacggtagccactggccacatggagcaagtttaaccaccaaagatttggagctttaattttaattaattgtaatgatgtggttggccacgtgcagctagtggctgccatctagtcttgctcttgacttgctagtgacactcagaatgggagtgggaggaaagaggggctgagggagctgtggagagaggaagggataggacagggtcccctgaagggggctaatgccttgggaaaaacaaacaaacaaaaaacactggcttcagaatgaagatgacgtgggttcaagtcccagctaacctcttggctttgggcggctcttcaaacctttctgaacttccatctcctcatctgtgaaatgggggtattttaaataacacttatttcgcaaggtttttgtgaacatcaaatgggaaattatcaaaaaggttaaatgggacaaggggtgcagtcccccagtaggaagcccagcaaatggagccctgcaggtgctcctgtcttcatccttccactgggggagacaaataggccagcttcacccccacagccccaggctccctttcctgagtctccagcccagccaatgctagcagagtgtcttctgctcccttcctgccttgtatagaggtgcaggcacaaatgtgagacagagatacatttaaagtgatgctgctcggctgggcacggtggctcacgcttgtaatcccagcactatgggaggccgatgcgggcggatcacttgaggccaggagttcgagatcagcctggccaacatggcgaaaccccgtctctaccaaaaatacaaaaaaattagccaggcgtggtggtgggcgcctgtaatccctgctactcgggaggctgaggcaggagaatcacttgaaccctggaggcagaggttgcagtgagccaagattgcaccattgcactccagcctgggtgacaaaagggaaactccatctcaaaaaataaagtgatgctgctctttccgaacatcatttcctcttgtgggcctccctagactctcaggcttggctccctggaggacctgggcaaggagggagggggcactggggtagtgaggggagtggcagagggcagggaggagtggactagaaggtgctgggccgtcccagggtgtgaggggagaaggcagcggaacagtggaatctgtggcttcttcttttccaacacaaacttcccctgaccagccagaggtagcaaagtttgtcttgttttctttctcacagtcctcctggctgccatcagaacttggccaagacagccaggctggaggaggcacagtctctcctggcctcctgccaggtctccagccgcccacgtggactggtggtgcagccacgtccctcctcctggctactctctcctgtccactcctgtccaccccatcctgccaccctgggctgcccagttcctctactgtcctgcccacctgtgggcccttgagctctaatctgccatgcttttggttttttactgaaaccctgccttctgtgctagattttactctggtgctcaccattaatctttctctcagtgcaggtggtgaagacctaaagctaatggggcttaggagggaagagaagggcatcagctgagtgcccacacaggccagggtcaccttcagtgaagctgccagtttggtgacgtccacagtactgcaggcagctctgctgtgttctacagcaacagattctggccctgcccctgcccgtgcccgtgcattggaccgggtgagaaagtgtgggtggcgtagacactctacacccgagaaaatcaagctcaaagcacatggcttccataggcaaaaggtggggctcccagccatgtattatgaagcaggcaggtcactgtcccctccggtcccctccacccctccagcagccctgtgctgctgtgtttgctgtgccagcctttgcccccagtgcacgctcctctgctgtgttttggaagttgcactgagaaagaagagaaattgttccttgccctgaggagctgccatccagctggggacacacagcgtaagagagcagcctagagtggagaagcgggtaggcacttggcttcagggaggtggcaggactttccccgggccttgaggaatgatgagagaagcacagagcaggcagccagacgtggggccttgtggtgcttcaggtgtatttagaaccagcggatggcgtgggttggtgtgggacatgcatgtggaggacagtggtgtgggagaagggacaggctgcttggatcgggattgtagatgacctacaacaccaggttaaaagaatttggattctataggaattgcagtaaatgtgagagggtgcagggaaccaaacggctttgaatgatcacaaagggggctgaagcatggcgtgctgtagtcccagctacccaggaggtggaggtgggaggaatccgaggccagctggggcaacttgagggactccataaagaggaggcttggggcacgagatccaccatgtactgactgcctgctgcaggcggacacggtgcctgggtatttaacatgagttgtcttgttcaatcttcacaacagccctacagggtaagtgctttttccccctgtttcacagatgagaaaactaagttgaaattatttgtccaaaccagctgctaacaagcaaaaatgtttgaaaaagattcaaacccaggcctgttggacttccaggcccacatagatcctattactctgcagctgacaccatgctataaatgaatggcagaggttcatggacaggcttaagaggctccctaaaccctgtaaggatgtgtgcaaaattccttatgtatatgaatatttctagagagaagatttctgctgtcaaagctggccaggtatggtggctcacgcctgtaatcccagcactctgggaggccaaggcaggtggatcacttgagctcaggagtttgagaccagcctggccaacatggcaaaaccatctctactaaaaatacaaaaattagccgggtgcgggggcaggcacctgtaatcccagctactcaggaggctgaggcaggagaatcatttgaaccagcgaggcggaggctgcagtgagccgatttcatgccactgcactccagcctgggtgacagagtgagactccgtctcaaaaaaaaaaaagtgaagagttcctaagtgaaggttactggctcatgaggtccctcctccacagctttcctcctctgggggcctgagagtcaggacagaagttctagcacaagtgtttcacataggggtccttggtagaccagggcttaggcttggaagaaggaaaatggagtgagcacgaggaagagaaaaagcctggaaaagcagcttattttgtgctgaggagagaaggaaaggggccacccagagctgctctggggctccagggcctgtgggctcctcccctcctttgttcctctctgcttggctccagcgagaggccatttcctctcctctctctttctccatgacacccacgcttccctgtggactcacctctgcagccacagcaacaccctcctctccttggcgtggaagccagcgctcctggcccactcccagtaggggatgtcctctgagttgtttttcctgtgcggggaggggtggactgagtcatccacactcttcacctggttcctctggtgaccaagaacatagaaggagagggcacatccccaatcaggtgttccgaacatctctgcggggactgaccctcctcagcccaggtgctcccatgggactggctacacttcttgactcagttttaatctctccttctctgccttcctgttgggaataccccctcacttctgtggcttctttcctgtagtagacgatcaagggtggaatctacagtccatgggccctgacttcttgccttcgtctcaaatagactctgcagccagccatctatgcagcgccccagtggctttgaaatgcaacagaaaccatcacccccggaccgtgggctccatgccagtgggcaaagcacaggtgcgttcactgagttcccagcacatagctgtggcaggcacttggtgatattttgaaataaaagaatggaagaatgtgtccaggctgtgcttcccctttctaccttactcagggacatggtgccctcctctctggtttcctgccctgtgcccaccccccaccccctgcaagcacagctcttatgtgcaaagcccctgtaggtgctggagggattcactgatggccttggcggaggtggcagtgggcatgtgcacttggctctgacacagccactcatgcaacaccctgtgcaatctcggcctgggcctgtgtgtcctgccctcattcctcgcgggtgactgtctcccctgagccactcttctctctattggattagctccttttatttccccctagggatgcaacacatttttatgaacaaacagcagtgttcacatggctgtgatgaggacgtactggggtttcccctggacatggcattcatctgatgccagtggtgggcaggaccgtgctgtatactttaaaaaaaccctagggggttctgttaggtgcccccactgcagcataacgagttgcccctagctgagaagccctgtcctggggcctgtccacaccatcctcttcctgagattattcctggtgtgggcggtgctcggctctacctttccttccttcttccctgcttggctcctggtccaatggctctctcctctatggaatggcctcctggagcttggctgggtcagcccccactttccactcttcccatgcctgtcctcaccctcccagcagccctgccagcctccgacgggcccagggcactgcagccggcacttgggagtgaagactggggccagagccaggctcacctttggccactgaatcctgaaagaggaggaatttggcaagtggggttctgcccaccaagctttcttccccccgctcccctgagtcttttcccttcacccccacttcccaaaagcagcagggagtcagctgtagggcagtcgctccctggccgaagccttcctggctgtttccgtcacaccctgaggccacccctcttatcttgcgaggagggaggcacacagaggctgtgattagctgtcacagtagcaagactgttcccctctctgtcctgcggagtgagtgtgagggaaaagagctctccttgtctgctcattatgtgcacctgttaaatagtcattctttccactagggctattagtggtttttattgttactggtcacccagaattagagtcacagcttcctcgacagggtgaaagagagcgccagggtgcagtctgaacgtgctctcgggagaggagaggccggaaagacttgtaccaggagggacttctaggctgggctggcccttggagcgcctaggaatgggactgtggtggcccatcttccctcctgtgttctgggctgtctgagtgcctctgggtgagagtcctcacaggagggagcttctcctactgcccagtgtctccctggcacctgaggcatcacccagcacacagaggtgaccaggaaacacagactcctgttagagaggcatctcgtgtcccgctctgttctcttgggccctgggactagaacatcttcaccagagaccggcgccgactccttggcagtgtgtaacattcagctcggtgccgaggtctgcccgtgcaggactgatctccattctctcaatgaccctaggagacaggaattattattattattattattattattattattattattattattattttgagatggagtttcgctcgtagcccagcctggccaacatgatgaaaccccatctctactaaaaatacaaaaattagccgggtgtggtggtgaacacttgtaatcccagctacccgggaggctgagacaggagaatcacttgaacccgggaggtagaggttgcagtgagctgagatcgcaccactgcactccagcctgggcgacaagagcgaaactctgtctcaaaaaaacacacatacacacacacgtttgggaccatccctatttcctcgctctgcctaagctgcgtcacaccattcatcactaggtgacatcctactacagataccttgtaagcatctgtgtatctctctcctccctcactggaaggcagctccctgagggcagggccctgatccctttgactggctgtggtatcctctcctgtagaccgctggctcatgaaataatcagggagagaatgtgtaaatgatgatcgtgaggtccacttggacaagcagcctgtgcctgaattttcctgagggcttcagagcctgtctcgcctcgcctcacatgcctggctcaccttagaacggtcaccttgacggctaaagggacacctgtgtgccttgatggtggacccagggagtggatgacattagtgagggaaagagcaaaggctctggaggaaaacacctgagaggagtctctaggctgccctctggtggcagttcttggaacaagacctgagagccgctaccttggctctcagcattgcacgggagtttagaggttattaaagaaatccccctaaagtcccatcccaaggtcacatacagaatgaatggctaagtagcgacaagaacccaagtcacagtctgttgatctcactaccatgctatcctgcctgcccccatcacaggagttgagattatactgcaaaaggaaaggtggggatggggtggggactggggaatttggggagggaattgattactgcctctgaggatattagggggaaaaacccacaggaggtgcatttggcttaattcagcaagttttttgagttttgattcagtgccaggcacctggtgggcacttaattaaagattagcaggagaagaaaaatgtacagtaagagagcttaagtttataccaaagcgagtcttgggtctaataattttgaaacatgaaattggcagagaagttaggagtccctcctgggctcctacgtcagggtttgccccctctctaatttaactttttatcaaattttattgtcatgatgtatatgtttgtcctccctaaacacagagccccttgagggcagggaggactgaaactgcttcctgggactgtcaccatcacatagcaccccacagagcagatgctcaatgaatgttgattgtgtgggcaaatggatgaacaaatgaatggtttggagtttccctggccagagagcttcaaagcagggcagacaaccatctcttctgtctagtccaaagacatcattcgctgcccaaggctcagggctgtgcctggtgctttctcaaggtaacttagcttgtataattagattttaccgtgatactagttctaggttctttttttttcattggccaagcatttaataactatctgtcatgtccaaggttctgggctattgttctgtaaatctgtgatcctattctgttatttaattccgtgactctgtgttgacatagacgtgacggtgtccctggggcatttactcctaggtgagcttagccaaggcaggtagagaggaaccagcattgtctaatctgaatggataagccagcacaatgggtttccctgtgcaaatacctccataccatccaggcccactcagtctcctccccagctaatgaagacagcctgtttgagtgccaaaatccactgcctattaataggtactaaaatctccaattgccttatgcctcccccttctctttcccactcacctacctgccatgtcagcctgggaagaattggtttgcagccaggcagtcctccatccagtcttgactttggcacttgtgatatgacttgcacaggtgagttacctctctcagtgttggttcctcgtctgtgaaatggggctaatcatttgctttattgagtgccttctaggctgggtactaggagagaaggaagggatacaaagaaagacaaggcacagttgctgtcttcaagaagctcatactttccaaggaaataaaggcatggaaacccacatagtgctgtggaattaaagaaggcagcatgctgtaaagagccccagctttttccctagacaacatcaggggctcagttcctttccctcctttctctcttctttaagaatttctcttagctggacatggtggcacatgcctgtggtcccagctactcaggacgctgtggtaggaggatcccttgagcccaggaggtcaaggctgcagtgagctgtaactgcacctctgcactgtccagcctgggcgacagagcaagaacctgtctcaaaaaataaaaaattaattaattaattaattttttttcctcctaactaattccacgttattggcttgagggtcagtttgaggggtccagacctccttcttcctttctatccttagcttcctgccacagtatacccagagatgtatgtgtttctccccaccctaggcacaattttttttttttttctgagacagctctgtcatccaagctggagtgcagtggtgcaatcatatctcactccagcttcaacctctcatgctcaggtgatcttcctgctgagtagctgggactacaggcatgcactaccatggcctggctaattgtttgtttttttttttgagatggagtctcactctgtcgtccaggctggagtgcagtggtgcgacctcggctcactgcaacgtccgcctcccgggttcacgccattctcctacctcagcctcccgagtagctgggactacaggcgcccgccacctctcccggctaattttttttgtatttttagtagagacggggtttcaccgtggtctcgatctcctgacctcgcgatccgcccacctcggcctcccaaagtgctgggattacaagcgtgagccactgcgcctggcaacctggccaaatgttaaacattttttttgtagaggtgaggtcacactatgttgcccacactggtatcaaactcctgagctcaagcgatcctcctgccttggcctcccaaagtgctaggattacaggtgtgagccactgtgcctggcccttttttaattttaattttttttttttttagagatggggtcttgctgtgttgcccaggctggctttgacctcctgagctcaagcaatcttccacctcagcctctggaatagctgggattacaggtgcgccctaccatgttcagctaacttattttgtttgttcagagacagggtcttgttatgttgcccaggcccaggcacagttctaatagaggagagagactttcagatatgagctcctgcacttggcaccaagatcttccctaattttcccccgacctgtctctccaacatgtctctctcttcttcgggttattttactccaatcattccgatctactctttgttaattgggcccttcattaaataatttagcctttcacaaaacacacattaagtgtgcatgacggcccaggcactgtattctctgtcagggttacacagatgaataaagagctgggatgggccaggcgcggtggcttatgcttgtaatcccagcactttgggaagccaaggctggtggatcacgaggtcgggagttcaagaccagcctggccaacatggtgaaaccccgtgtctactaaaaaaaaactacaaaaattagccaggtatggtggcgggtgcctgtaatcccagccatgtgggaggctgaggcaggagaattgctttaacccaggaggcggaggttgcagtgagccaagatcgtgccattgcactctagcctgggtgaaaagagcaagactccgtctcaaaaaaaaaaaaaaaaaaaaaaaagagctgggatgatgtagtggttaaaatcagtgttgttagcatagcacagacctaaattgaaatcccagttctgccatttgtcccctgtgtgaccttgcatgggtcactgtacctctctaggcctgtttctgtcttctgtgaaatgatcatgatagcattgttatgcaaattaaacgagagcttaagctgtagagcatttaccaacagtgccctatggcacatgcgcagtagaaagtagttgcaatagtgtgtagcaaatactttgcatcctaggttggattccccagaagcaggccctgagacaaagattcaagtaaaagagatttatttaaaactaatgagaagttgggcagggtggctcacgcctataatcccaacactttgagaggcggaggcaggagggtttcttgagctcaggagtttgagaccaggttgggcaatatagtaagacccaatctctacaaaaaaaattagccagacgtggtggcatgcgcctgtgatccagctacttgggaggcttaggtgggaggatcgcttaggtccaggcttcagtgagctgtgatcgtgccactgtactccagcctgggcaacagagtgagaactgtctcaaaaataaataggccaggcacagtggctcatgcctgtaatctcgacactttgggaggccaaggcgggcagatcacctgaggtcaggagtttgagaccagcctggccaacatggtgaaaccctgtttctactaaaaatacaaaaattagctgggcatagtggcgcatgcctgtaatcccagctactcaggaagcagaggcaggagaatcgcttgaactcaggaggcggagattgcagtgggctgagatcacaccactgcattccagtctgggcaacgagagggagactccgtctcaaaaattgaataaataaataaataaataaataaaagtaatgaggggactgggcatgatggctcacacctgtaatcccagtgctttgggaggccaaggcaggaagattgcttgagtccaggagttccagaccagcctgggcaacatggcaagacatcatttctgcaagaaattaaaaaattagcccagtgagtggagtgcatctatagtaccagctactcagaaggctgaggcaggaggaccacttgagcccaggaggttgagactgcaatgagttatgattgtgccactgcactttagcctgggtgacagagtgagaccctgtcttaaaaaaaaaaaaagtaatgagggtggggaggagtggaaagggagtgggaaagtgggacccaagcacatgagtggaaccaagctaagtctcatggagggctggggtactgacaccttcatatttgtccaccgttggttaaggcctgggggcgggctgggggagtgggagggtggtggcatgtgaggatgtgggagagaaaaatttccaagtgcttccagctctctgcccctggaaaaggtcccggcagaggcataggcggggctgttgggagtgatttagcactctgggagtccgtaggcacaaaaatggtaaaggggttcaagaagaaatgcgtagaacacagtccctgccccacaaggttcatggcctgggaagggaagacagacatgaataaatcattgccatagggtgactggggtgaagggcgttgggggtcgggtggggtgcgggaaggagtggtgtaggcagaggcatccctgaggagaaatgcagctggtttgggagaggacggccattccagacatagggaacagcacacacgaaggctgatgcacatacgcgcaagggctggtccctagagctggtggttctggccacgagagctcatcacctgggggcagcttctgtacctgcaccctgtatgaggctccgggtctgcccttcctggtccatcctccagacacactgcctgttcttctctcaggtcccgctccgggccctcctcccagaagcctcccctgactagtccagctcaccgtgactcttctgaactcacggcgtttactgccaaggctattacattggcgctcgctcatgtcattattaggaaatatgcatttttactgtctttgatgttatttaaacttgcctgtaaattctgtctctctcaattttaagttctgagtagaaactacatatttttattatttatattcttatattctcccatggcacccggcattcgtggacacattgaggaagtaagataatgaatgaatgaatgggtgaatccagtccagcttggggcctatttaattctactaggctcaacctacaattcttatgtgttctcagattattcctaaaccctaagcttagttttgtttcattcggaccacatgtagtttttttttgttttttgttttctgagacagggtcttgctctgtcgcccaggctgcagtgcagtggcacgatcttggctcaccgcaacctctgcctcccaggttcaatggattctcctgcctcagcctcctgagaagctgggattacaggcgcccgccaccatgcccagctaatttttttgtatttttagtagagacagggattcaccatgttggtgaggctggtctcgaactcctgacctcaggtaatccacccgcctcagcctcccaaagtgctaggattacaggtgtgagccaccacgcctgatctcatgtgtagttttttggttttttatttgtttgtttttttgagatggagtctcgctctgtcgcccaggctggagtgcagtggcacaatctcggctcactgcaagctccacctcccaggttcacgccattctcctgtctcagcctcccgagtagctgggactacaggcgccggccaccatgcccagctaattttttttgtattttttagtagagactgggtttcaccatgttagccaggatggtctcgatctcctgacctcgtgattcgcccgccttggcctcccgaagtgctgggattacaggcgtgagccaccgcgcccggcctctcatatgtagtttttaatgagagttaccacataagcaaactgggttctaagtggtgaaatttaaggttatgcaacctcagtttcttttaacccctcttcatccctaaccctggtcggatacttgattgacagtagaccattgggatctctgagctcctgtccttctaacctgattgcctctttaaaggattttgaaaaactatgtcccttgcacatttgtattgttttgagacacggtctcactctgttgcccagactggagtgcagtggtgccatcttggctcactacagcctcaacctcccagggtcaagcaatcttcccacctcagcctcctgagtagctgggactacaggtgcgggccaccacatctggctaatttcttaaattttctgtagagacagttttgccatgttgcctaggctggtctcaaactcctggccacaagcaatccacccgattcggcctcccgaagtgctggtattacaggcatgagccacctcgcccagccccttgcacatttttaagtcaacatttaacatttgtaataatttaatagcattccaaagggtaggcttttcagggaattgcaaatacatgttaaaaatcacatcactatttatgtatttatttatttatttattatttttgagatggagtctcactctgtctcccaggctggagtgcagtggtgcgatctcggctcactgcaacctctgcctcccaggttcaagcaatcctcatgccctagcttcccgagtagctgggatgcccagctaagttttttgtatttttagtagagacagagtttcaccattgtccaggctggtcttgaattgctgacctcaagtgatctgcctacctcagcctcccaaatgctgggattacagtcgtgagccaccatgcctggccatgtcagtttttaaaattaaaaacaatttgttgtgctcagtctgtcggagactgcacgtcactctaagtgtagcaaattgaatataatgccatagaactttcatatctgttagcatccttttaaaaaatacgtgaacaagcccttgaacaagtgttagaaacagttattctatttgtattgcaattattgcagttaaccaaaactaggaatattcacaaggattaaacataaaaagttggtcaggcgcggtggctcgtgcctgtaatctcagcactttgggaggccaagatgggccgatcacttgagctctggagtttgagacaagcccgggcaacacggtaaaaccccatctctaaaaacgaaacaaaactaaactaaacaaatacaaaaaattagtcaggggtggtgcacctgtagtctcagctacgccagaggctgagataggaggattgcttgagcccaggaggttgaagctatacgagccatgatcgtgccactgcactccagcctggatgacagatggagaccctgtctcaaacaaacacacaaaaagacatgaaaagtaacttattgaaaatgcatctcttggccaggcgtggtggtttacacctgtaatcctagcactttgggaggccaaggcaagcagatcccatgagatcaggaattcgagaccagcctggccaacatggcaaaatcccatctctactaaaaatagaaaacttatctgggtgtggtggcacacacctgtaatcccagctactcgggaggttgaggcaggagaatcacttgaatccaggaggcgaagcttgcagtgagctgatatctgtcgtgccactgcactccagcctgggcgacagagagataatacgtctcaaaaaaaaaaaaaaaagaaaagaaagaaaatgaatctcttaatgagatgggaaaggttgatttgtttcctattgacctttggcggctctgggaagggcactctggtcaggcccaggacaagcaggagattcattctagcggggggcacatattaatctggaaactgattcccttaaaactggtcctgccgacacacccctgggaaggtttgcatataccactaggggtatccaagccataggccattaaacagagatgaaacttgccttcccattctttaatatagtgttctcagaaagggagaaatgtgggcctgaatgttattgtgacttgcatagtgacatttccaaccctcctcctgctaagccccagagccttacatgctggacatgggcaagataggaactcaagttacttccaggtctccgtaagtttaggactgtgaagagggcatcctaatagtcaaaaacataagtgttggccgggcacggtggctcacgcctgtaatcccagccctttgggaggccgaggcggggagatcacgatgtcaggagttcgagaccagcctggccaacatggtgaaaccccatctctactaaaatacaaaaattagccgggcatggtggtgcgcacctgtaatcccagctactcagaaggctgaggcaggagaatggcttgaacccgggagccggaggttgcagtgagccgagatcgtgccattgcactccagcctgggcatagagtgagactccatctaaaaaaaaaagaaagaaaaagaagaaagaagccgggcgctgtggctcacgcgtgtaatcccagcactttgggaggcccaggcgggcagatcacgaggtcaggagatcgagaccactctggctaacacggtgaaaccccgcctctactaaaaaatacaaaaaattagcctggcgtggtggcgggcgcctgtagtcccagctactcgggaggctgaggcagaatagcgtgaacccgggaggcggagcttgcagtgagccgagatcgtgccactgtactccagcctgggcgacagagcgagacttcgtctcaaaaaaagaaaaaaacaaataaataaaaataaatgaaaaagaccctaagtgttagttaaagcagcagcctagattcagagttaagaaaacatgatttttatttttccgtttcatggaagcagcagctgtctactgatagttcctgccgccggccaccaggtggcagaagggaacacagtaccgtagccctgccccagcgatcgcgcgggcaggaagaccgggtgggaggtaggtggggccgaggcctggaggcgaggtaggagagtaggcttaggctgtcagaggaaaaaacgggcgatgtgaggactaagtatggatctcaggaggggacaggaaatattgagaacaccaccttacgggttcagaataaaaccgagggaatgaggaagaggtttaaggagataggctaaattgggaagaattcacggggaatcagagggtggagagggcgtgggtgcctggagatgcctgggaacagaacggctgaggggactccattatctgtactcttcccggggtgggtctaggtctggctcctcctgaggtcggttgtccacctcaggggcaggaggccaggggttttctgggggctggggtcctgccggccaagggtcgtcaggccggggaggttgaggaggatccgttctaggcggttcagggggccagactccagtttcaggcaggtctctccagggacgactggggcgggtaggcggaggatcttcaaagagagggggtgcccctggccaagggtcaccggggactggggggccctgaggcaatgttggggagcctgcctcctctcggtcctctgcgggtgggtgagaggggtggccctcgctgcctgagatgcctgtaaaggaggaaggagaaaggtaagaggtggtgagggcttctctccccagccccacccagccccagccccaggaggaggagcctgtctggatggacgcagcctgaactgacccacaaacagaccaaaaaagtcactctcaaagagctctcggtaggtttgtaaatacttaactgatggtaaaatgtcatgaacccctacccccgatggatctgaaccgttcacttgacccactttaaactgaccagacttctccaaataagctccatccacccctggttggggtaccccactagctttgtcctcaggccaacctgcaacccaaggtgggttacaccttggcccccaggcacacagaccccagctttacaaggaccccagctccttaacacagatcccagctccgaggaaactcgtcccccccacgttaatcctgaccgactttgccacatggagccagcaaaccatttctggtgagagccaaatgcaccttctgcaccatgtcccccacccaatgtgtccagaaagccatttctggtgagccagatgcaccttctgcgtcccctgaattcctgtccccaaccccatgcgtccagttcacctccgccatcttgagtatccctcatcaccccaaactgcagtccctgcctctgttcccacctcacctctggtgtgcaggcaaaggaccaggatccccaggagcttccagttgaggatcatggctatgtactggcccccaaagctggggtgggctgagtctgggtgcctgggaaccccaagaggctttataggggaggagtggaggagggaccagcccagtggcacaggaataccatcagaacagaactggtcaaacccgttgggaaggcctgggctgatgtgtcacccctgaaggtggcgtcccttattttagtcctccagcccaggacccagctgcctgctctccctatcatgacccagagcctgcgtcaccccaccctggttttcacaccctccatccacaccctggagcagtcaatacccacttggcatctccgtaatcacagagatgtccaccttcatcccttgcaactattggaagccaaagaatgggagcaaaccacacgatgggcgttgggaagcaccgtaattacagggttgggaggcaggatgcctgcgctgggggaggaggtgcctttcaaacctgggatgcagctgggacagtgtcagctactaccccagcctccccactcacccccgcactgaaagctccccctggggcttcgtgctttcctgggcacttcccttcccccatgggatccaggcatcctgctctccaccatgtccttcttcaggcatgcaggggacctccaagcaatgatatccaaggaattccatctggcagccacccaggatgactgcagaaaaggaaggacacaggaggatatcctggttccctcttcccacccagagctgtttgcatcagtcctgccaatggctccggaagaagctgccaggctccagcaacctcagccccttcctcctccctcaggaatccacctatccgcctctaggaccttggctccaactctattgtactcgtctcctccctcccattctccttttggtctcagctccttgatctaagcctcccagagagacccctagaatgtttccctcaaggacctttctgcctggaagtctgttagcctttcagaagtaacatgtccaaaataaaatttgattcctcccaggttgttccctgcctggtccgctaccccacagtaaggaacaccttattatgcaatggcgtgatctcatctgttccctccagggctcacgcagaaaccttcgttacactcctccaccatccacctgcaagcccctccacaccctgtccaaacccagcccatcatcctgagccaccatctcccctgagcctccccaacacccttctaattggcccccttgctcccactgtttatccctccccctcacacaaagcctgtcctccaccagcaaaagaggtcttaaaatatacatcacgcgggcctggtgtggtggctcgcgcctgtaatcccagcactttgggaggccgaagcgggcagatcacctgaggtcgggagttcaagaccagcctgaccaacatggagaaaccccgtctctactaaaaatacaaaaatattagccggacatggtggcacatgcctgtaatcccagctactcaagaggctgaggcaggagaatcgcttgaacccaggaggcagaggttgtggtgagctgagatcacaccattgcactccagcctgggcaacgagtgaaattccgtctcaaaaaaaaaaaacatatatatatatatcaggccaggcgtagtggctcatgccagcactttgggaagctgacacaggaggaccacttgagctcaggagttgtgtgcgctgcttcacctgcagcaagactgtgggcaacacgtgggaggcctacctggggctgctgcagtccaagtacgctgatgggga

SEQ ID NO: 22619 - DNA, 3120 bp, Homo Sapiens
atgccgcggctcccggtgaagaagatccgtaagcagatgaagctgctgctgctgctgctgctgctgagctgcgccgcgtggctcacctacgtgcacctgggcctggtgcgccagggacgcgcgctgcgccagcgcctgggctacgggcgagatggtgagaagctgaccagtgagaccgacggccggggggtccacgctgcgccatccacacagagggctgaggactccagtgagagccgtgaagaggagcaagcgcccgaaggtcgggacctagacatgctgtttcctgggggggctgggaggctgccactgaacttcacccatcagacacccccatggcgggaggagtacaaggggcaggtgaacctgcacgtgtttgaggactggtgtgggggcgccgtgggccacctgaggaggaacctgcacttcccgctgttccctcatacgcgcaccaccgtgaagaagttggccgtgtcccccaagtggaagaactatggactccgtatttttggtttcatccacccggcgagggacggagacgtccagttttctgtggcctcagacgacaactcggagttctggctgagtctggacgagagccctgctgctgcccagcttgtggcctttgtgggcaagactggctccgagtggacagcgcctggagaattcaccaagttcagctcccaggtgtccaagcccaggcggctcatggcctcccggaggtactactttgagttgctgcacaagcaggacgaccgcggctcggaccacgtggaagtgggctggcgagctttcctgcccggcctgaagttcgaggtcatcagctctgctcacatctccctgtacacagatgagtcagccttgaagatggaccacgtggcgcacgtcccccagtctccagccagccacgtgggggggcgtccgccgcaggaggagaccagcgcagacatgctgcggccagatcccagggatacctttttcctcactccacgcatggaatcttcgagcctggagaacgtgctggagccctgcgcctacgcccccacctacgtggtcaaggacttcccgatcgccagataccagggcctgcaatttgtgtacctgtccttcgtttatcccaacgactacactcgcctcacccacatggagacggacaacaagtgcttctaccgcgagtctccgctgtatctggagaggtttgggttctataaatacatgaagatggacaaggaggagggggatgaggatgaagaagacgaggtgcagcgccgagccttcctcttcctcaacccggacgacttcctggacgacgaggacgagggggagctgctcgacagcctggagcccaccgaggcggccccgcccaggagcggcccccagtcccccgccccagcagcccccgcccagcccggagccaccctcgccccgccgacccctccccgcccccgggacggggggacccccaggcactcccgggccctgagctgggccgccagggccgcccgccctttgccgctcttcttgggccgagctccgcccccgcgccctgcagtggagcagccgcccccaaaggtgtacgtgaccagggtgcggccgggacagcgggcatccccccgggccccagcgccgcgtgcgccctggccgcccttccctggcgtcttcctgcaccccaggcctctgcccagagtgcagctgcgggcgcccccacgcccaccccggccccacggccgcaggaccggcggcccccaggccacacagccgaggcccccagcccgggcgcaggccacccaagggggccgggagggccaggcgcgcacgctgggacctgcggcgcccacagtggactcaaacttgtcctccgaagcgcggcccgtgacctccttcctgagcttgtcccaggtgtccgggccgcagctgcccggggagggcgaagaggaggaggaaggggaggacgatggggccccgggcgacgaggccgcgtcggaggacagcgaggaggccgcgggcccggcgctcggacgctggcgtgaggacgccatcgactggcagcgcacgttcagcgtgggcgccgtggacttcgagctgctgcgctcggactggaacgacctgcgatgcaacgtttcggggaacctgcagctgccggaggcggaggccgtggacgtgaccgctcagtacatggagcggctgaacgcgcgccacggcgggcgcttcgcgcttctgcgcatcgtgaacgtggagaagcgccgggactcggcgcgagggagtcgcttcctgctggagctggagctgcaggagcgcgggggcggccgcctgcgactgtccgagtacgtcttcctgcggctgccgggagcccgcgtaggggatgcagacggagaaagtcccgaacccgctcccgccgcctccgtgcgccccgacggccgccccgagctctgccggccactgcgcctggcctggcgccaggacgtgatggttcacttcatcgtgccagtgaaaaaccaggcacggtgggtggcacagttcctggcggacatggctgcgctgcacgcgcgcaccggggactcgcgtttcagcgtcgtcctggtggatttcgagagcgaggatatggacgtggagcgggccctgcgcgccgcgcgcctgccccggtaccagtacctgagacgaaccgggaacttcgagcgctccgccgggctgcaggcgggagtggacgcggtagaggacgccagcagcatcgtgttcctctgcgacctgcacatccacttcccacccaacatcctggacggcatccgcaagcactgcgtggagggcaggctggccttcgcgcccgtggtcatgcgcctgagctgcgggagctcgccccgggacccccacggttactgggaggtgaacggctttggcctttttgggatctacaagtcggactttgaccgggttggaggaatgaacacggaggagttccgagaccagtgggggggtgaagactgggagctcctggacagggtcctgcaggcagggctggaggtggagcggctccgactgcggaatttctatcaccactaccactccaagaggggcatgtggagcgtccgcagcaggaagggctctcgcacgggggcgtcttga

SEQ ID NO: 22620 - DNA, 3724 bp, Homo Sapiens
cggcggcgggcccaaggcgtgaggcgccgcccgggtgtccccgcggcgcaggaggcggtggagcgcagagcgggcgagcgcgaaaaatcactaccaatataatggattttatatatcagattgctttattctggatatcatggtaacaatacagaaagtatacataatttcccatttctgcaagtagtcatgactgctgaagaaagaaaaacttaaagctacggcagaattattttatggaaattctgattttgtttttaatttttgataactttttactaaaggtatgaacacacaaagagcttattttgttaggcaaatacacattaataagaatgcctagaagaggactgattcttcacacccggacccactggttgctgttgggccttgctttgctctgcagtttggtattatttatgtacctcctggaatgtgccccccagactgatggaaatgcatctcttcctggtgttgttggggaaaattatggtaaagagtattatcaagccctcctacaggaacaagaagaacattatcagaccagggcaaccagtctgaaacgccaaattgcccaactaaaacaagaattacaagaaatgagtgagaagatgcggtcactgcaagaaagaaggaatgtaggggctaatggcataggctatcagagcaacaaagagcaagcacctagtgatcttttagagtttcttcattcccaaattgacaaagctgaagttagcataggggccaaactacccagtgagtatggggtcattccctttgaaagttttaccttaatgaaagtatttcaattggaaatgggtctcactcgccatcctgaagaaaagccagttagaaaagacaaacgagatgaattggtggaagttattgaagcgggcttggaggtcattaataatcctgatgaagatgatgaacaagaagatgaggagggtccccttggagagaaactgatatttaatgaaaatgacttcgtagaaggttattatcgcactgagagagataagggcacacagtatgaactcttttttaagaaagcagaccttacggaatatagacatgtgaccctcttccgcccttttggacctctcatgaaagtgaagagtgagatgattgacatcactagatcaattattaatatcattgtgccacttgctgaaagaactgaagcatttgtacaatttatgcagaacttcagggatgtttgtattcatcaagacaagaagattcatctcacagtggtgtattttggtaaagaaggactgtctaaagtcaagtctatcctagaatctgtcaccagtgagtctaattttcacaattacaccttggtctcattgaatgaagaatttaatcgtggacgaggactaaatgtgggtgcccgagcttgggacaagggagaggtcttgatgtttttctgtgatgttgatatctatttctcagccgaattccttaacagctgccggttaaatgctgagccaggtaagaaggtgttttaccctgtggtgttcagtctttacaatcctgccattgtttatgccaaccaggaagtgccaccacctgtggagcagcagctggttcacaaaaaggattctggcttttggcgagattttggctttggaatgacttgtcagtatcgttcagatttcctgaccattggtggatttgacatggaagtgaaaggttggggtggagaagatgttcatctttatcgaaaatacttacatggtgacctcattgtgattcggactccggttcctggtcttttccacctctggcatgaaaagcgctgtgctgatgagctgacccccgagcagtaccgcatgtgcatccagtctaaagccatgaatgaggcctctcactcccacctgggaatgctggtcttcagggaggaaatagagacgcatcttcataaacaggcatacaggacaaacagtgaagctgttggttgaaatcataattaatgcgttactgtatgaaccacaaaacagcactatttatttagccttacttctacttccagatgcagtgcctcttttggagaagacatgtttatttttcatgttctttctgacattactttagcaattcaacttgatgtgagaagaaaaaacaaatgtttcaacacaaaatctctgttttgtgagaatactgcactatggaataattgacaaattgaaatctcatatttgtcccaaaagttgttttgagttagttctacctggtgcccatgttctgattgtgtgtgggattgcatggtgtcctgattgcatctaggtggagcggatggaatgtgctgggccactgttgggtggagagcagcacattcttacagaggagatggagcgttatgagcatagtatgtggataggtatcttcacctgcccgcccctgagtcagcctccttgacttgatagcttgaagaatccttttccactgaaatagaggataattaattgacacatctgaaatccccaatcaatcaatcaagagaaaggtagaactaaaaactccttaacttactgttgcttacacccctgaaagtctgtttttaagcaaatgggtaatagtagaaaataggttagaatctatggcttgattaaaaatatgttattacattatcatgttcaggattaggattagtagtcagttgctgtaaactattttgaacaaacagaaaagaacacggaaacatttttaacagagcatttaattatgttggaatacaggatcctagctctgtctgggaacattagtttatgtgagccagctctatcagggtcttcccatggtggttcagaatagatgagcatagcatggttttgtttgtttttgctttcaattttctaatttggcatggatccatatgtatttactatcctttttctaatatattaatatatgctacatttgtatttgcattactataatactttgagttgaaaaagagtttcattgtggagagaaaaagcaaatggtatgccacaagatcactctgatttgagaaaagggaggaggggaagatagtctgaatggaaatctgaaatacggaatgttttagagaaatatgtcacttgcatatagaatgttttaattgaggtataaattaatgagacaaagtgaaaaagaaattatattcagataggactgcactacattatttgtcacacatggatctgttaccatcaggtcaattcctagtatgcataaattttttaacccttttaaaagagacctatgttgaaaacccctgaaaattcactgaagaaaaatcattactctttttctcagtaaatcatatcatctgaaatattacaaatttcaaatttctaggtgctatattaattcaatattacaataactcttacctaattattcttacaagttttaagttgtggtagtttagtgatttttttaaaagatgtgtgaaatgttctctgcaaaataattcaggccactgtctccttttatatattattataattatttattatgaagaccagtgaattacgatatttaaagtgagagaacttaattatttgcaaaggtaagttacagcttgttttttgagagaatcaaatgagtttacttttgttcctgttgtttttaactagctttaagtttaaagatggaagctaagcaatggaaatgctatacgtttttgacatttattaaatggtaccaataaagtattttattaccaaaagttaaa

SEQ ID NO: 22621 - DNA, 7539 bp, Homo Sapiens
cgtgcgtgtcttgtctccctgtccacgtgtgagctgtgagtgtgtgtgagtcagagttcgggtgtctgtgggtctctgagcctctgctggcagcacccggggctcgccaagctcttgccggctggcgcgcgcccagcccctggcgggacttgtccgtgtgtctgtccgcgcgcggggcctggagaagcacgctgcagtcctgtccgcctcccgctcgctgcctcgctggctgtcgctcgctcgctctgcctctccgcccgggctctgccgaagggggcggggtgggggtgcagggcggggggaggggaggctcctgcattcttgcggtcggggaggaatccgagccagcgttactggtctccagaagagcccagctgcagccccggggccccgccaggcctctcgctgcccgcccgggcctgctgggatgggcacgggctaggcctcgagctggggacggggcggggcgtggccccaaccccgggccccctccacggctggagcgctctgggggtggggcacgaggggtaccccaccctgggtgaggggcgcgtctgggagcaggaatccctcagggggccaggggagacctcacagccgccccacacggcacctttgctacctagccttttagtgaattctgtctctgccgcccgtcggggcggaggcttgctggagactgcaagccccctgagggcaaggtgcgggagggatggggacagggctggcctccaggatcgagaccccatctcgtaatcctctttttccagtgccaccccaccctatccagctccctagtcccagggctgttgggtcctcccttctcccctccccctctgacaccccctccccaagtcacgagttttctctttggggcttgttgctgcagtccgtgctccagtaccgagtacctggctgggccctgggcacgcacaggggccgtagccccactgtgtgtgggagccatgaggatcctggctaacaagacaaggttaccccaccccaggaggagagaagctccagggagcccgccgctgtccccccgcggtcattgcccccctgccccagccaagccaatgcacccagaaaataaattgaccaatcatggcaagacagggaatggcggggcccaatctcagcaccagaatgtgaaccaaggacccacctgcaacgtgggctcgaagggcgtgggggcggggaaccatggggccaaggccaaccagatctcgcctagcaactcaagtctgaagaacccccaggcaggggtgccccctttcagctcgctcaagggcaaggtgaagagggaccggagtgtgtctgtggactctggagagcagcgagaggctgggaccccatccctggattcagaggccaaagaggtggcgccgcggagtaagcggcgctgtgtgctggagcggaagcagccgtacagtggggacgaatggtgctctggaccggacagtgaggaggacgacaagcccattggggccacccacaattgtaatgtagcagacccagccatggcggccccacagctgggtcccggccaaaccacccaactgcccctcagcgagagcagcgtgccaggcgccccgcacggccctcctcctggccttcggcctgatgcccctgggggcgggggcgggggcgggggcgtccccggaaagcctccctcgcagttcgtatatgtcttcaccacccacctggccaacacggctgcagaggcagtgctgcagggccgggccgactccatcctcgcctaccaccagcagaacgtgccccgggccaagcttgaccaggcccctaaagtgccccccaccccagaaccgctacccctgagcacgccgtcagcaggcaccccgcagtcccagccacctccactgccgccgccgccacccccggcccctggcagtgccccgcctgctctgcccccagaggggcctcctgaggacagcagtcaggacctggcccccaactcggtgggagctgccagcacaggtggtgggactgggggcacccaccctaacaccccgacggctaccaccgccaacaaccctctgcctcctggaggagaccccagcagtgcccccggccctgccctgctgggggaggcagccgcccctggaaatgggcagcgcagcctggtgggctcagagggcttgtccaaagagcagctggagcatcgggaacggtccctccagacgctgcgagacattgagcgactgctgctccgcagcggagagactgagcccttcctcaaggggcccccaggaggagcgggtgaggggggcccaccagcacaagccccccctcccccccagcagccacccacggcccctcccagcgggctgaagaaatatgaggaacccttgcagtccatgatttcacagacacagagcctagggggccccccgctggagcatgaagtgcctgggcaccccccgggtggggacatggggcagcagatgaacatgatgatacagaggctgggccaggacagcctcacgcctgagcaggtggcctggcgcaagctgcaggaggagtactacgaagagaaacggcggaaagaggaacagattgggctgcatgggagccgtcctctgcaggacatgatgggcatggggggcatgatggtgagggggcccccgcctccttaccacagcaagcctggggatcagtggccacctggaatgggtgcgcagctgcgggggcccatggatgttcaagatcccatgcagctccggggcggacctccctttcctgggccccgtttcccaggcaaccagatacaacgggtacctgggtttgggggcatgcagagtatgcccatggaggtgcccatgaatgccatgcagaggcccgtgagaccaggcatgggctggaccgaagacttgccccctatggggggacccagcaattttgcccagaacaccatgccctacccaggtgggcagggtgaggcggagcgattcatgactccccgggtccgtgaggagctgctgcggcaccagctgctggagaagcggtcgatgggcatgcagcgccccctgggcatggcaggcagtggcatgggacagagcatggagatggagcggatgatgcaggcgcaccgacagatggatcctgccatgtttcccgggcagatggctggtggtgagggcctggcgggcactcccatgggcatggagtttggtggaggccggggcctcctgagccctcccatggggcagtctgggctgagggaggtggacccacccatggggccaggcaacctcaacatgaacatgaatgtcaacatgaacatgaacatgaacctgaacgtgcagatgaccccgcagcagcagatgctgatgtcgcagaagatgcggggccctggggacttgatggggccccagggcctcagtcctgaggagatggcccgggttcgggcccagaacagcagtggcgtgatgggcggcccgcagaagatgctgatgccttcacagtttcccaaccagggccagcagggattctctggaggccagggaccctaccaagccatgtcccaggacatgggcaatacccaagacatgttcagccctgatcagagctcaatgcccatgagcaacgtgggcaccacccggctcagccacatgcctctgccccctgcgtccaatcctcctgggaccgtgcattcagccccaaaccgggggctaggcaggcggccttcggacctcaccatcagtattaatcagatgggctcaccgggcatggggcacttgaagtcgcccacccttagccaggtgcactcacccctggtcacctcgccctctgccaacctcaagtcaccccagactccctcacagatggtgcccttgccttctgccaacccgccaggacctctcaagtcgccccaggtcctcggctcctccctcagtgtccgttcacccactggctcgcccagcaggctcaagtctccttccatggcggtgccttctccaggctgggttgcctcacctaagacggccatgcccagcccgggggtctcccagaacaagcagccgcctctcaacatgaactcttccaccaccctgagcaacatggaacagggtaccctcccgcctagcggcccccggagcagctcctcagcacctcccgccaaccctcccagcggcctcatgaaccccagcctaccattcacttcctccccagaccccacaccttcccagaaccccctgtcactgatgatgacccagatgtccaagtacgccatgcccagctccaccccgctctaccacaatgccatcaagaccatcgccacctcagacgacgagctgctgcccgaccggcccctgctgccccccccaccaccaccgcagggctccgggccagggatcagcaacagccagcccagccagatgcacctgaactcagccgctgcccagagccctatgggcatgaacctgccaggccagcagcccctgtcccatgagcccccgcccgccatgctgccctcccccacccctctgggctccaacattccactgcatcccaacgcacaggggacaggggggccccctcaaaactccatgatgatggccccagggggccccgactccctgaatgccccctgtggcccagtgcccagctcctcccagatgatgcccttcccccctcggctgcagcagccccatggtgccatggcccccactgggggtgggggcggggggcctggcctgcagcagcactacccgtcaggcatggccctgcctcccgaggacctgcccaaccagccgccaggccccatgcctccccagcagcacctgatgggcaaagccatggctgggcgcatgggcgacgcatacccaccgggtgtgctccctggggtggcatcagtgctgaacgaccccgagctgagcgaggtgatccggcccaccccaacggggatccccgagttcgacttgtcgaggatcatcccctctgagaagccaagcagcaccctccagtacttccccaagagcgagaaccagccccccaaggctcagccccctaatctgcatctcatgaacctgcagaacatgatggcggagcagactccctctcggcctcccaacctcccaggccagcagggcgtccagcgggggctcaacatgtccatgtgccaccccggacagatgtccttgctgggcaggacaggcgtgcccccacagcaggggatggtgccccatggcctgcaccagggggtcatgtcccctccacaaggcctcatgacccagcagaatttcatgctgatgaagcagcggggcgtggggggcgaggtctacagccagccgccccacatgctctccccgcagggctccctcatgggccccccgccccagcagaacctcatggtgtcccacccccttcggcagcgcagtgtgtccctggacagccagatgggctacctcccggcaccaggcggcatggccaacctgcccttctagaagtcgctgccagggctggagccggggcaatgttgcaaatacgataaccttaacaaagttcttcccctcaatgttgggatggcctgggtcgcggggtggggtggagggggtgggagggggcttgtgtagggagtggcatttgtggaaaccagatgtgctggcagcttagggggaagtggcagtgtggggtgggggattttgcattggggttggttccatttcggccaccaggactgcccctcccccactcctcccaattcctatggagcctctctattttacctctttccgtgcatccctgcacccgccacacccccttcagctatgcttttggagtcctggatgggaatctggggggagagaggaaggacaggtcaggtctcccccagccccttctgctcctgtctcctcgtgtccgcattgctggagctccacctccctcttggtttctccgcacccgcccattttccttctgtctttacctgcttcgtatcctttccctgctgatgtggctgacccctctcccacccctccctgcaggcggctggccaggtgggcaggtgccagccggagctgtaaatagagcgctgcgcttttgtgctggtttgtgcgtgtgctgtatttctgtgttttgatagaagtcacacaaaaaaaaaaaggataaaagaaacccttccccccttcttcaagttattgctccctccattcccctggacccagggacatgcagccctacatggccacccactgtttgcagtgtctctgggtccctaagggataccattcctgtctcgtccccaaatggtaagatgacgtaaatgacccactcctaaactgaggtcagaccacctaggcttccacctggtgagccctagcagggctgagacccccagggcggcagcctgtctgctgctgagtgattcagggagaacatgtgtgcacgtgcatgtgtgtttgcccacaccggtgacacggggccctggctttccactttggatgcccgggcatccgctgctgctacatcttagccagaacttgaagtcttttgtcccagtttgggatgaaggaaaggaggaagaggcggtggctgtgtggcccccttgagtggagccatggaaggggtggcatggtgccactggggcctgtggctgtagtagccctgggccaggtaacctccagggccctgacttttccagaggctgctgccacctacttcttatcaaagaagggggagaacagttcatctgagtcagtgcacctcccctccagtctccactccctgaggatggaatcggggaaacagcatcctgccgcctcctctctgcctgcccactcaccggcaaggttgtccctctgcccagggctcagggccatgtaccagatctgtctgtgcccacccaggcacagccactgcctcccccttggctccctgctcctacccaggagagctccctatccgcctttggtcagagctgaagccatatacgactgggtgtttgtccccctactttggccccaggagtaaaaaaacttctccttttctcacttcctttcctgcctcgggaggtggcagggcagttccctggctgaggccttttgcgccccacctccaggaccaagggccattctagacagggtgtcttctaccaggacccgtccctagccttcctggcctggagggcctggtcttgcactggcagctgtaatacaaagggaactcgccccacttctcccaagcctggtgctgtcctctcggcccaccatcggccaggtccagcgcttcctctggggctgacaacaggcccctgactcaccccggtcacctcccagggtccatggccagggcctctgtgtttggggggccacttgcccttcatcctgccaggcgcttttgcccgccctgcctcagcctgggccctgtgcccttgagccctccacccctggcccaagacccccccaaactgtctgactctgtgtttcctgccctgaggagagaggggtcagattgcagcgggccgagtgccctctccgtcccctctcctcccacccacgccacaggccagcctactcttcc

SEQ ID NO: 22622 - DNA, 3306 bp, Homo Sapiens
ggagccggtgccggcccgcgagccccagcgtctctgcagaccagtcccctccagggtccggcggggcccgcgcggtgggaggagtcgggcactggccggcgactaacgggtccgactgctgaccaagctaggagagacccggaccacggagacagagaccccggcatcgcgacccccgaggacctcctctcctcgccctgtggcacccactagtcctgggcactcagccgcggagagcccccgaccccgcgcgcccagccccgggggagcccacctcctccccgcggcccgcccgggccatgctcccccggggcagcgggtgagccccagccgggaccgggatcggagcccgcgcggagcatggatccgggctgggggcagcgggacgtgggctgggcggccttgctgatcctcttcgccgcctcgctgctcacggtgttcgcctggctgctgcaatatgcccggggcttgtggctggcgcgggcccgcggggaccggggcccgggacccgccttagccggggaacccgcgggttccctgcgggagctgggcgtgtggcgctcgctgctgcggctgcgggcgactcgggctggcgccgccgaggagccaggagtccggggcctcctggcgtcactcttcgccttcaagtctttccgggagaactggcagcgggcttgggtgcgagcgctgaacgagcaggcctgcagaaacgggagctccatccaaatcgcctttgaggaggtgccccaactcccacccagagccagcatcagtcatgtgacctgcgtagaccaatctgagcataccatggtgctgcgttgccagctctctgctgaggaggtgcggttcccagtctctgtgacccagcagtcccccgctgccgtctccatggagacctaccacgtcactctgacactgccaccaacacagttggaagtcaacctggaggaaatccctggtgaggggctgctcatatcctgggccttcactgatcgcccagatctcagcctaacggtgcttcccaagcttcaggccagggagagaggtgaagaacaagtggagctctccacaattgaggaactgatcaaggatgccatagtcagcacccagccagccatgatggtcaacctcagggcttgctctgccccaggaggcctggtacccagtgagaagccacccatgatgccccaggctcagccagccatccccagacctaaccggttattcctacggcagcttcgggcatctcacttgggaaatgagctggaaggcaccgaggaactgtgctgtgtagctgaactcgacaaccccatgcagcagaagtggaccaagcccgcgagggctggatccgaggtggagtggacagaagacctggcactggatctgggcccccagagccgggagctgaccctcaaagtgctgaggagcagcagctgtggagacaccgaactcctaggccaggccacactgcctgtgggctccccctccagaccactgtctcgaagacagttgtgcccactcaccccagggccagggaaagccctgggaccagcagccaccatggcagtggagcttcactatgaggagggctctccccggaacctgggtactcccacctcctccactccacgccccagcatcacacctaccaagaagattgagcttgaccggaccatcatgcccgatggcaccattgtcaccacagtcaccactgtccagtcccggccccgtatagacggcaaattagactccccctcccgctccccgtccaaggtggaggtgaccgagaagacgacaactgtgctgagtgagagcagtggccccagcaatacctcccatagcagcagcccaggggacagccacctttccaacggcttggaccctgtagcagagacagcgattcgccagctgacagagcccagtgggcgggtggccaagaagacacccaccaagcgcagcactctcatcatctctggtgtttccaaggtgcccattgctcaggacgagttggcgctatccctgggctatgcggcatccctggaagcctcagtgcaggatgatgcagggaccagcggaggcccctcttcacctccctcagacccaccagccatgtctccaggaccgctagatgccctctctagtcccacaagtgtccaggaagcagacgagacaacccgttcggatatttctgagaggccatctgtggatgatattgagtcggaaacggggtccactggtgccctggagacccgcagcctcaaggatcacaaagtgagtttcctgcgcagcggcactaagctcatcttccgccggaggcctaggcagaaggaagctggcctgagccaatcacacgatgacctctccaacgcaacggccacgcccagtgtccgaaagaaggccggcagcttttctcgccgccttatcaagcgcttttccttcaaatccaaacccaaggccaatggtaaccccagcccccagctctgaggacccagctctgaaagggcacgagttctctcagcccattccccacctccccttccataccccttcctggatctccagtgcctgggccaggaaagccctctgggttccgggaagccccgtccaccctgggccatggggccggttggaaggatacttggaacgggaagcacatgagaggtgggcacccggtgccgaggacatggacgagggactggtggctgggagggagaggagggccctgtccggcatgtgtgggtattccccagaagcatttgcctcctgctgagcctggtccctgagcggagtcccagggtgctcagctcttcagctgacccttcttcccttatttattctcttttctatttatatgtgtggcttaggaccctccgtgaacagatgatagagggcatctctcccaggtgacccttcttttctgtcccaggagggtgggtaattccctttgggatggggctcccacacctccctcaggtccccactcagaccagcaccagtgtctgcctctgagaatgttggcagctcacagagagcagggccggcccgggatggggggcaggtactccccaccttttattaccgttttttgtacttgatgccttctctgtgagcagtggctctgtgggaaggagggagccgggagcctggtgggaagccttccccagagagatggctttaggggctttatttaaagactgtgatgatggagccacgcaaggctgcacctctgtgtgttgggagacgatgatgatgtccattgctgtgtgatggcttggaatttaatttattaaagtcaaattggagttt

SEQ ID NO: 22623 - DNA, 5687 bp, Homo Sapiens
cggatcagagatagcagagcgccgagttggggccacgaaggcgtgaggggagtcgtcgtccctcctgcacgaaagcgtctaagccttggcgacgccgccctgggggacccacgtcaggcctgggatagggaccgctgtccccgggtccctaccaatgtcgcccgtcgctcccggcccagctctacccgcagagtctgatggcagcggccactctgaggacgccaactcagggcactgtgacctttgaagatgtggccgtacacttctcctgggaggaatggggtctccttgatgaggctcaaagatgcctgtaccgtgatgtgatgctggagaacttggctcttttaacctctctagatgttcatcgtcagaagcagcaccttggagaaaaacatttcagaagcaatgtgggcagagccttgtttgtgaagacctgcacattccatgtgtcaggggagccttccacctgcagagaagttgggaaggacttcctggccaagttgggatttctccatcaacaggctgctcacactggggagcaatcaaatagcaaaagcgacggtggggccatcagtcacagaggaaaaactcattacaactgtggagaacacacaaaagcattcagcggtaaacacacacttgttcagcagcagagaaccctcactacagaaagatgttacatatgcagtgaatgtgggaaatcctttagcaaaagctacagtctcaatgaccattggagacttcacactggagaaaagccttatgaatgtcgagagtgtgggaagtcctttaggcaaagctctagtctcattcagcaccggagagttcacactgcagtacgacctcatgaatgtgatgaatgtggaaaattatttagcaacaagtctaacctcattaaacatcggagagttcacactggggaaaggccatatgagtgcagtgaatgtgggaaatcctttagccaaaggtctgcactccttcaacatcggggagttcacactggggagaggccttatgagtgcagtgaatgtgggaagttttttacatatcattccagtctcataaaacaccagaaagttcacagtggatccaggccttatgagtgcagcgaatgtgggaagtcatttagccaaaactctagcctcattgaacaccatagggttcacactggagaaaggccttataagtgcagcgaatgtgggaaatcctttagccaaaggtctgcactccttcaacatcggggagttcacactggggagaggccttatgagtgcagtgaatgtgggaagttctttccctacagctccagtctccgaaaacaccagagagttcacactggatcaagaccctatgagtgcagtgaatgtgggaaatcctttactcaaaattccggcctcattaagcacaggagggttcacactggggagaagccttatgagtgcacggaatgtgggaaatcctttagccataactccagccttattaaacatcagagaattcatagtcgataaaagccttatgagtggcaaatgtggaaaatctgttagcaccctggagaaagtccttgagtacacagtgaatgtcagaaagcttcagctgaaggccatatctcattgagtgccacacagttcacaagggaaagacacttttgatatgtagggatgtccagttgatataacagctctgaaggagatcccttatgagggtggcatcagcctgaattgaacatcctatatctgaacatctgcataaattccaggtatgtgtgaactgcattgcaccttttgccctgcccagggcccatgtcagatttatgtctctgctgatactatagtggaagccattttacctctactgcctggcaggtgaccaccagtgtgcaccactcacccatcccagtgtattcaggccatggacctgacccagtttggcccagaggactctgctggtgacctgaaaagagggactacatatttcaggatattgttggtctcacatgactcttgatagagtttgccagccttcaaatcaccaactgtgggaaccaactgcctcttattgccttggtttgtacaataacaaaggccttattaatcttgggggttctatatgtatgggttggtttgaaaacagttgggttctgctaacatgaaggggtgaataactttttttggagatcccaaacattgtgtagctcaacagggacagggacagggacagtaggatggcagaatatagctctctctctagtttgagcctagttttcattgctattcaaggcctctgagaaaaaactacagggtattgtcctaatttatatcctggatgccatagaggtcagcctgaggaggcagcagttacttgacatcctttgatgtttctgaaagcaacatgaaattgttctcttgttcacaaggaatactgcatcgtgttcagtgccagtgggggaaatctgttccccaggtcctgtatgccttgatatcctgaattccacagggtagcaccacaggtggtaagattatagtaggaattataattgttatagaagtactggattgatagagagtggaaaactgcaataacactgcaataaatagaatgtgccccttttacagaggtttccatgatgttcgttattatggctcttaaggatgagcaggtacagaaatcctcaggacctacagaattgtgtatcttgtgtagctgaggtcattgtcagaaattttatggaatcctgtagcctctgggattttcacctcaaggtcattgctatgcaggcaggaaaacaaggatagagaagggaggtctaggccattgatacagcctttgtgatccagccaacatttctgttgagtcaggtggaaatggccttcactgttcacttgtatttgtgatcactgaggcaaaatcctctcccaggacatgaggagagagatggtggaatcaacatagggttgtcaaacctgattttccaaaaacaataggaaattcagacttttattttgaaccatattttgttaggttggtgcaaaagtaactgtggttttgaaccatgatttatttttatttttatttttttttgagtcagagtcttgctctgttgcccagtctggagggcaatggcactgtctcagctcattgcggcctccgcctcccgggttcaagcgattcttctgcctcggcctcccaggtggctgggattacaggcacccgccaccacgcccatctgagttttgcatttttagtggacatggggtttcaccatgttggccaggctggtcttgaactcctgacttcatgtgatccacccaccttggcctcccaaagtgctgggatttacaggcatgagccactgcgcccagccaagctttttcaccattccaatttccttcaaatgctgaacagccgtggaatggttgacattgagttcttaggcaacttctcatgtagttgtaagaggatcagcttctaatattgctctcaattggtcattgtcaacttccagtggctggccactacttctcttcaaggctcttgtctcctttgcaaaacttcttgaaccaccactgcactgtacattcgttagcagttcctgggccaaatgtgtttatatcgtgagttgtctctgctgctttacgacccattgggaactcaagtaagaaaatctcagccgggtgcggtggctcacgcctgtaatcccagcactttgggaggctgaagtgggtggatcacaaggtcaggagttagagaccagcctgaccaacatgttgaaacctcatctctactaaaaatgcaaaaattagccgggcgtggtggcatgtgcctgtggtcccagctacttgggaggctgaggcgggagaatcgcttgaacccgggaggcggaagtcacagtgagccaagatcacgccactgcactccagcctggacgacagacaaaacaagactccgtctcaaaaaaaagaggccagatgcggtggcttacacctgtaatcccagcgctttgggaggccgaggtgggtggatcacaggtcacgagttcgagaccagcctggccaacatggtgaaaccccgtctctactgaaaatgcaaaaattagctgggcatagtggcatgcacctgtaatcccagctactggggagcctgaggcacgagaattgtttgaaccccgggaggtggaggttgcagtgagccaagatcgtgtcactgcactccagcctgggcaacagagcaagactctatctcaaaaaaatcgctgaaatttgagttttgtctaacatttccatagtctaaaataaacataaacagcaagtagtaagtcagcaaaaaaacataaagcgagaaatgcctattaaaatgatgtataaccacatttatttaagaatgttttccaatataaaatggcaaaatccaacatgcaaaaacggcaattacttttgcactaacctgataataattttaataagaataaatggtacatatttaaactatataatttgatcagctttgatattcatattaacctgtaattgctcccaccatgccaattttgaaactgccaacatgttactgaatgtagaattgggaagagttgctgatagcatcctaatatattctgtttctaccatactgatacagtggccacgaataacctcaagaatgtagaaaataaaatgtagtgaaatgattaggaagaagttgtttcttcacaatcatgacaatgaacgtgtcattccacaagttacctcattgtcctttaataattatctgcctataggcaactattgatttactttccattataatacattagttttcatttgctagaattttatatgattgaaaccataatgtatttactcttttttaatccctgggtatagtcacgtatttattttgagattcatcattatacctctatgagtagtttcttttttttgtattgctgagaagtatgatgttctgtggatataccagtattcgtttattcattcattcatttgttatggatattttgagtagttttttaaagtagtttgaggtataatggaacttaaagtgcttatatttaaaatgcatattttgatattttcatacatgcttacaccctggaacgcagtttccttctgtctttttagttcattctcaacatataaaattaattttcattgtgtaaaattactggtacaatgacatattttgtctcctgttacagctgtgttcaattacaaaaaaagatggaaaagactgttatgaagccagatgaacctttctccagtcttccttcactatttttttttccttcaccatttatcatttcatagtcatttatgtttcatcggtcctcatgtgtactagtgcgttattttacttatactcccggatatcatattatttaatgcatagcctcttcagaatgcaattttaaaatgtaaaggctcttttataaccccccaaaaaatcacacaaatatattttaaaatgtaaatattttatcgcttctgttttctcagttgtctaaaacaatgtgtttcttaaggaagatcatttttattcaggatccaaatgtatatttaatagctttcagtagttgtatctcataagtctgtaacctacaggttccatttacctttgttttcttatttcttgaagttgctgagtcattttttaattagaatttgctgtattct

SEQ ID NO: 22624 - DNA, 6803 bp, Homo Sapiens
cgtaggaggaagaaaacaaacacatcagatattttcagcactaaaagagatggttttccccacatatatgtaaaagaaatttgcaagactactggattttgatctcatggttgcagtgggtgaataggtggccttttgtgatctcctacatcaccctggaagtgagacttcttcggtttcttctagagtcagtttggtatcagaatggcaaagcaacttaaccttccagaaaatacagatgattggacaaaagaggatgtaaatcagtggttagaaagtcataagattgaccaaaaacacagggaaattttgactgaacaagacgtgaatggagcagtcttgaagtggttaaaaaaagaacatcttgttgatatgggcatcacacatggaccagctattcaaatagaagaactattcaaagaattgcggaaaacagccattgaagattcgattcagacatctaagatgggaaagcccagtaaaaatgctcctaaagaccaaactgtgtctcaaaaggaacgtagagaaacttcaaagcaaaaacaaaagggtaaagagaacccagatatggctaatccgtctgcaatgagtacaactgctaaaggttctaagtcactaaaagttgagctcatagaagataaaatagattatacaaaggaaaggcaaccatccatagacctgacatgtgtatcatatccatttgatgaattcagtaatccatatcgttacaagttggattttagtctacagcctgaaacaggaccaggcaatctcattgatccgatacatgaattcaaagccttcacaaatacagcaacagccacagaagaggatgtcaagatgaaatttagcaatgaggttttccgatttgcttcagcttgtatgaattcacgtaccaatggcactattcattttggagtcaaagacaaaccccatgggaaaattgttggcatcaaagtcaccaatgataccaaggaagccctcattaaccatttcaatctgatgataaacaagtattttgaagaccatcaagtccaacaagcaaagaagtgcattcgagagccaagatttgtggaagttttactgccaaatagtactctatctgacagatttgttattgaagtggacattattccacagttctctgaatgccaatatgattatttccagattaaaatgcaaaattacaacaacaaaatatgggaacaaagtaaaaaattctcactatttgtgcgagatgggaccagctctaaggacattacgaaaaataaagttgatttcagagcatttaaagcagattttaaaacactggcagagtccagaaaagcagcagaagaaaaattcagagcaaaaacaaataaaaaagaaagagagggaccaaagttggttaaattattgacaggaaatcaagatttgttagataattcatactatgaacagtacattcttgtaacaaataaatgccacccagatcaaacaaaacacttagatttcctgaaggaaattaaatggtttgctgtattggagtttgatcctgagtctaacatcaatggagtggtcaaagcttacaaagaaagccgagtagcaaaccttcactttccaagtgtatatgtagaacagaaaaccacaccaaatgagacgatttctactctaaatctttaccatcaacccagctggattttctgcaatggcaggttagaccttgacagtgaaaaatataaaccctttgatccaagttcctggcaaagagaaagagcttctgatgtcaggaaactgatttcatttcttacacatgaagacataatgccaagagggaagtttttggtggtatttctattactgtcctctgtggatgacccaagagatcccctcattgagactttctgtgctttctaccaggatctcaaaggaatggaaaatatactgtgtatttgtgtgcacccacacatatttcagggatggaaagatctacttgaagcaagattaataaaacaccaagatgaaatttcaagccaatgtatttctgctttaagccttgaagagatcaatggcactattcttaaactaaaatctgtgactcaatcttcaaaaaggcttttgccatctattggtttatcgactgtccttctgaaaaaggaagaagatatcatgactgctctggaaattatctgtgaaaatgaatgtgagggtacactgttagagaaggacaaaaataaattccttgaattcaaggcatcaaaagaggaagacttctatcgaggtggcaaagtgtcatggtggaacttctacttctcttctgaaagttattcttcaccttttgtcaaaagggataaatatgaaagacttgaagcaatgattcaaaactgtgcagattcttctaaaccaacaagtaccaaaattattcatctgtatcatcatccaggctgtgggggaactaccttggctatgcacattctctgggaactaaggaagaaattcagatgtgctgtgctgaaaaacaagacagtggatttttctgaaattggagaacaggtaaccagtttaatcacctatggggcaatgaaccgtcaggaatacgtacctgtactactccttgttgatgattttgaagaacaagataatgtctatcttctgcagtactctattcaaacagctatagctaaaaagtacattcgatatgaaaaacctctggtgattatcctaaattgtatgagatcacaaaatcctgaaaaaagtgcaaggatcccagacagtattgccgtaatacagcaactctctcccaaagaacagagagcttttgagcttaaattgaaagaaatcaaagaacagcataaaaactttgaggatttttattcctttatgatcatgaaaaccaattttaataaagaatacatagaaaatgtggtccggaatatcctgaaagggcagaatattttcaccaaggaagcaaagctcttttcttttctggctcttcttaattcatatgtgcctgataccaccatttcactatcacagtgtgaaaaattcttaggaattggaaacaagaaggctttctgggggacagaaaaatttgaagacaagatgggcacctactctacaattctgataaaaacagaggtcatcgaatgtgggaactactgtggagtacgcatcattcactctttgattgcagagttctcactggaagaattgaagaaaagctatcacctgaataaaagtcaaattatgttggatatgctaactgagaatttgttcttcgatactggtatgggaaaaagtaaatttttgcaagatatgcacacactcctactcacaagacaccgcgatgaacatgaaggtgaaacaggaaattggttttccccatttattgaagcattacataaagatgaaggaaatgaagcagttgaagctgtattgcttgaaagtatccatcggttcaacccaaatgcattcatttgccaagcgttggcaagacatttctacattaaaaagaaggactttggcaatgctctaaactgggcaaaacaagcaaaaatcatagaacctgacaattcttatatctcagatacactgggtcaagtctacaaaagtaaaataagatggtggatagaggaaaacggaggaaacgggaacatttcagttgatgatctaattgctcttttggatttagcagaacatgcctcaagtgcattcaaagaatctcaacagcaaagtgaagatagagagtatgaagtgaaggaaagattgtatccgaagtcaaaaaggcggtatgatacttacaatatagctggttatcaaggagagatagaagttgggctttacacaatccaaattctccagctcattcctttttttgataataaaaatgagctatctaaaagatatatggtcaattttgtatcaggaagtagtgatattccaggggatccaaacaatgaatataaattagccctcaaaaactatattccttatttaactaaattgaaattttctttgaaaaagtcctttgatttttttgatgaatactttgtcctgctaaaacccaggaacaatattaagcaaaatgaagaggccaaaactcggagaaaggtggctggatattttaagaaatatgtagatatattttgtctcttagaagaatcacaaaacaacacaggtcttggatcaaagttcagtgagccacttcaagtagagagatgcaggagaaacctagtagctttaaaagcagacaagttttctgggctcttggaatatcttatcaaaagtcaagaggatgctataagcactatgaaatgtatagtgaacgaatatacttttctcttagaacaatgcactgtcaaaatccagtcaaaagaaaagctaaatttcatcttggccaacattattctctcctgtatccaacctacctccagattagtaaagccagttgaaaaactaaaagatcagcttcgagaagtcttgcaaccaataggactgacttatcagttttcagaaccgtattttctagcttccctcttattctggccagaaaatcaacaactagatcaacattctgaacaaatgaaagagtatgctcaagcactaaaaaattctttcaaggggcaatataaacatatgcatcgtacaaagcaaccaattgcatatttctttcttggaaaaggtaaaagactggaaagacttgttcacaaaggaaaaattgaccagtgctttaagaagacaccagatattaattccttgtggcagagtggagatgtgtggaaggaggaaaaagtccaagaacttttgcttcgtttacaaggtcgagctgaaaacaattgtttatatatagaatatggaatcaatgaaaaaatcacaatacccatcactcccgcttttttaggtcaacttagaagtggcagaagcatagagaaggtgtctttttacctgggattttccattggaggcccacttgcttatgacattgaaattgtttaagagcctgatattcttcctccaagaatttgatctcagtacccatttaatttttttggactcaagatctatgctttaaaccggcaaggttatagatacagcctctagctcttcagatctgtacatgcagtatttaatttcctcttaaacatgttatgagttctacaaagacaatagtgaaaaaggaaggagtgagatatatgaaaagtagcaaatatgttccttggtttggttaacatcattgatgacaaaataataaggagctatgactggagtcaggagaagttagtgtaataagctggctacacagaaccccactacttaccaggcatggattgaagaagattgtctactcaaatggcatttagacattagaatgtctgggaaaatatttctcaaagacagcaaaaacctctcaaactgaggagcaacatttattcttactaagcagatcatcaatgtatcatgtgcttggcactcaaggatcttccaaaacagaggaccaaccagtcttctgaaggtcatgcccacagaagtcatcagaccttaccaaagtaggttggagaattagattgccttttcatgcagtgagattcagttaagcaaaaatgaaatttgtctctatagctaattagcttatcaactcccctccaaacaaacaattaaaaaaaaaacatacagacactcaaattccacaagctaatgaacaaaagggactcttgtgagaagactaatgagtccctcatccagaagatgccaatgtactggcagattaacatacaacctatgttttgaacaaaaacaaccagcgatacgtaatcaaaatgtaattttcccctaataaaattatggatatgggcagtcatcaatggctgccaaaaccattaagtggaaagctgattaaaaaacaaaaatttctaatggatttatcaaactgtcccaaatcctgataaatattaacatcacagaggaagaccagacattatgggcctggaagtactataggagtgcacacatcacccgtgacatggtcttgccaaataattaaacctgaatttgatcaggtctctggatcttatttgcaattcaaaagaaattttaaaaaaatcctactaacaccaccacaaatatgcaatcagcaatatccagaaaggggaaattcacaggacaaaaacctggttttcttttttggtttcttcaaccaaaaaagaaagaaattgcaaaggaccaaaaaaatgttggggaatctatacattataagggacttaacaactaaagggcaacatatagactttagatcctaatttgagcaaaatctaaaatcaattattaggcaatcagaaaaatttgaacacagactagatatttgaggatattaaggtactatattattgaagattccatggttatgttttttaaagagttcatgccttttagagatacatactaaagtatttgtaaataaatgacatgatctagaatcagtaattttgtgtttggggtgtgggggtggtgaaagggaagtagaaccgaaacaagattagtcctgagttaacaatggctgcaagctggatacatggaattcagcacacttttctccctcttactgattatgcttttgaaattttctcttgtaaaacatttagaaaacaaaaacaaaaaaaatgtgatttgtttctgtcttcaaaatctcattagaattttttcactggaggaagattttcccttgcttctgcataaaattttaactccataacttataagctcactctttattgttactttctaattgacaaataaaaattgtatattaaaaaaaaaaaaaaaaaaaa

SEQ ID NO: 22625 - DNA, 10620 bp, Homo Sapiens
tggagatctctcttcgcaccaaccacattgggtgggtgcgggaatttctgaatgatgaaaacaaaggcctggatgtactggtggattacctgtcctttgcccagtgttctgtcatgtttgactttgagggtctggaaagtggtgacgatggtgcatttgacaaactccggtcctggagcaggtcaatcgaggacctgcagccacccagcgccctgtcggcccccttcaccaacagcctcgctcgctctgcgcgccagtctgtgctccggtatagcactctccctgggcgcagggccctgaagaactcccgcctagtgagccagaaggatgacgtccacgtctgtatcctttgtctcagagccatcatgaactatcagtacggattcaacctggtcatgtcccacccccatgctgtcaatgagattgcacttagcctcaataacaagaatccaaggaccaaagcccttgtcttagagcttctggcagctgtgtgtttggtgcgaggaggtcacgaaatcatccttgctgcctttgacaatttcaaagaggtatgcaaggagctgcaccgctttgagaagctgatggagtatttccggaatgaggacagcaatattgacttcatggtggcctgcatgcagttcatcaacatcgtggtgcactcggtggaggacatgaacttccgggtccacctgcagtatgagtttaccaagctggggctagaggagttcctgcagaagtcaaggcacacagagagcgagaagctgcaggtgcagattcaggcatatctggacaacgtgtttgatgtcgggggtttgttggaggatgctgagaccaagaatgtagccctggagaaggtggaggagttggaggagcatgtgtcccatctcacagagaagcttctggacctagagaatgaaaacatgatgcgggtggcagaactagagaagcagctgctacagcgggagaaggaactagagagcatcaaggagacatatgagaacacaagccaccaggtgcacaccctgcggaggctcattaaagagaaggaggaggcctttcagcgtcgatgtcatttggagccaaatgtccggggcctggagtctgtggacagtgaggccctggccagagtaggccctgcagagctgagtgagggcatgccaccctccgacctggaccttctggctccagccccaccccctgaggaggtcctgcctcttcctccaccaccagctccgcccttgccccctccacctcccccattaccagacaagtgtcccccagccccacctctccctggtgctgcaccctctgtggtgttgacagtgggcctgtcagccattcgaattaagaaacctatcaagaccaagttccggctgcctgtcttcaactggacagcactgaaacccaaccagatcagtggcactgtcttcagcgaacttgatgatgagaagatcttggaggacctggatcttgataagtttgaagaattattcaagacaaaagcgcagggccctgcccttgacctcatctgctccaaaaacaagacagcgcaaaaagctgccagcaaggtgactctgttggaagccaatcgtgccaagaacctggccatcaccctacgcaaggctggccgctcggctgaggagatctgcagggccattcatacgtttgacttgcagacactacctgtggacttcgtggagtgcctgatgcgcttcctgcccacagaggctgaggtaaagctgctgcggcaatatgagcgggagcggcagcccctggaggagttggcagctgaggaccgcttcatgctgctcttcagcaaggtggaacggttgacccagcgaatggctggcatggccttcctggggaacttccaggataacctgcagatgctcacaccgcaactcaatgccatcattgcggcgtccgcttccgtcaagtcttcacagaagctgaagcagatgttggagatcatacttgcactggggaactacatgaacagcagcaagcggggagctgtgtatggcttcaagctccagagcctggatctgctgctggataccaagtccactgaccggaagatgacactgcttcatttcatcgccttgacagtgaaggagaaatacccagacctggctaacttctggcatgagctgcactttgttgagaaggctgcagcagtgtccctggagaacgtgctgctggacgtgaaggagctgggccggggcatggagctgattcggcgtgagtgcagcatccatgacaacagcgtcctccggaacttcctcagtaccaatgaaggcaaactagacaagctccagcgggacgccaagacggctgaggaggcctacaatgcagttgtgcgctactttggcgagagtcccaagactacacctccttctgtattcttcccagtatttgtccgattcattcgttcttacaaggaagcagaacaagagaatgaagcccgcaagaagcaggaggaggtaatgcgggagaagcagctggctcaggaagccaagaaactggatgccaagaccccatcccagcggaacaagtggcaacagcaggagttaatagcagagttgaggcggcgccaggccaaggaacaccggcctgtttatgaggggaaggatggtaccatcgaggacatcatcacaggcctccactgccagcctatggttgttcgccaccaagccaggagtgctgcaccgcccagtggtccccctcgggctccaggcccccactgagaccctctcggaggcagaagcacttcacccctcagagtcctacaagtccaaccagtggacctggaattggccaagggctcaggagagggctgtgttgctctctcaaccatgtccgccccagctcttgaggctggatctttctacttgtgccactatgggcactaggtctgtaggtccctggtgcttccagtactgcactttgcccccaaggtctttgacttcatttcctgaagggtcaccaagggtcagctcagggctaggaaaaaccatttccagccttagcctaaacagggcacatagatctctcccactagagcccagagggatgagaggagagagcaactgttctttctttttttttcccttcctttttgcaggcccatggtcagctctggtctagatgtatctaggcttagggagccctgggaccctgccagtctcagttcatctcttaccaggagcaaggccctctgaagcatgggccgtgccagctgtgccctagtgataagggtaagaggagagatgtcaggctcactgcccttatttctctgcccatttcattctaggctcacactgtccttgtcaaggtgggcagaagagcagaggtcttctctgcaccaaccactctctgcagatggctggagaaagggtgtgccaactcttcaccttctttcctcagctacggttttttttttttttttttttttttggcaggggacaaggagcatggtggtcttggctatttgcttaccttcccgtttctcctctgcccctggaagggaatgtgggggcccacttttttgtacatgtaccacctccctttcctcttactgtacataaacctcagactctccccctctcaacaaaggcttgatgcaccaggcctgactttgtctcctctttctgagcttagggggctagggtggccatttagtctgacctgggctatggggatagaaaagaaatctttggggcactgcatctgttttggaggagatgagatcagaactctggggaaaggagaaccggctaggtgggctctagccacacaaagggaagcaggcctgccatgagacactagtgccctctgctgggcatgtgtccagtccccagcctgccccagtagcacatggaaaagagtcactggccatgttataaatattgttatttaaaaaacaaaaaacaaaacacacgtacattaggtcctgggtggaggaagaagtggtggagcctcagggccagggcaggcaggagcaggcactgatgctagagggtgatgaccctgccctctgccacccaggctgcgtccaacagcctgtgactcttccctggagaccccttctctcacacttttatctactggcatcacccaccccacatggcatataccacccatctctggtctggggctgagggcaaggactgcactagtccagggagtaggggacccttgaacaccaagagcaaccttgagaggtgccaacaatggtgtgctgggggtggggttactttagaaaaagtggacacagaccagactaaggaagaagtctgaggcagacggtgagggtggcccaggagccatggcctcacacagacccgaggcagagaacagctcattgggtcactggtgatcatccagctgctgtaggagtgtccgccgccgcctctccagctcaccctcactcagctcactttctgacgtgtcccagcctgtctgttggagcaaaggcacagttcacccttagcctgcactaagggccgtggaagcttgaccagcgtgctgactggcctagggcccctgcccctcaccttctccttcttgattccaaagcctggggaacggttagggagctctgcctgttggagctccctgtccttgtcctgttcttgttctttctcatcgctctccttgccagctttctcctcagggtctgtctcactctcaggactattctgtaagagtccagagcccacctcctcagttcctgtggatagcctgggaggcaggtagaacagaactcacaaaatagcaggggcttaggtagaagttccttcactcaccgacttgtgtcttctcttcttagttttcttttttggtttcttggctttccgaaggccatgatctagagatagaaaaatccctactaagtcccaacaggagaaagacaggctctttttctttgttctagcccctctgttcattcttcacaggcaggaacctcatgctctgaggaagtctaagtccagttttccttctccagcttcttgcttgggcaggtagaggaagttctttctacttccacaggtgcagccctcccaatccagtctaccctcaaaggagctggggcttgtggagggcatcctctcagtctgggacaacagttctccagcttctacgctcacagcaactgcttacctgctccaagaagatgggaggaaggggagccccgtcctccaagggcagcacccccactttcaactgaatcaagtgaggaagagggctcagagcctgactctgaggggttccgcctcctccgcttggggggccggagagatggtgggggcagctcctcttcttctgactcagagccctgggcagatcagcagatacatgtcagtgcagaggttctctgccctccagaagccctcgtctgggaattcgagagaggaggaggacccagggccaaaggaatcctcaaacttccctccaagggagatattgtaaggggaaaacaaagtgtttatttccccaaaacaacccagcttcaccccatgtcccttctacacgcttactcactgagggtgagtgggaacgcttgtgatggtgcttcttgcctttcctgccatgctttcggcctttggtgtggaggtgctggcattcagtctgctagaggcagaggaagaagggtgaggacagcaccagacttagccccaggaaggatcctacttcctaaaatctggctttgcctccctttctcagactagagccttctgcctatcccagggatcctcaggcctccccttccttagctggccaggagtgccctaagggtaagagggaggccactgaggtctctgttgaactggtctaatgagttcaagggcctgaggcagatccagaggacaagcctgcctcacctccagcacctgtaggaactcccggaagagccggatccgctccgactccagggtgatctgctcaaaggctgagtcacacacaaaacgctcacggaccttgaacgaggagagcactgctgatcagactaggccccactcagcctggcctggacaccgccatgagcacagggcagggctggggcagagaaaggaagggaactggagctggcccagggctgtgacgtgactggggtgggccctcagtggtgaagcaccgctgccctcaggcttgaggggtgcttggggccaggctacgctcctgacctcttcccaggcagtgcctagctccagagcaggcacagcctgcctcagcatgcttcgaaaggcagcttccctgcgccgcatcctgcgtgcctcctccttctcccgctccctctcccgtgcctctgctttctccagcagctgaggaaagaagggacacggaacagggtcacccaggagggtggatgccaggtcccactcaggcataccttaggaggtggaaagttagggtctgggcttctaccaccatcccctgaattgggaatatagtcagtgggacagtgagtgagaaggaatggagcaagacacagatgaattagagaacttcccacgccccgcccagcccctcacactattgaaggtcagcttgatgttgcctgcgtccagtgcggcagccctcttgtcaaagcttatgacgtgggcgaagtcctcaaaggccgtgttcacctccacgcagaagccccggtcctgtgggtacagcagtgcatgaagcaggggcaccacgtgcctgaggccaaagctggcaggcagagtggtcacattacagatggtcaagaaggcccttgcctctggaagagatccacaggactgtggtctgcattagaaaccaagttatccaagtcctcatcacttgacaattaagcccccatgcctacccttggtttggatgtcacacagagctgaaggggttgggagatgtctcccaactgctgattaatgctgagtttctcaaaattaacttttgttcctttggcttaaagctctggccccagctgggccctcctgctgctcagcagtgcttccatgcattctcaatcaacatttgctggcccctaccctttgggtctatttattgagtgcttactatgtaccaggtaccatgatgagtgtttcacacattatctcatttaatcctcttggttctacatttaagaataggtcctagtatcctaattttacacagaaggagaaaccaaggttcagagaaactagagcacttgcccaaggtctcacagctgatatacggctgggcaagaaccctaccctgggggggctctctatccccaaagtgtctgctttcaagcaccacacccacccagatgacttagtccatgggagaaacggaggccaccaggtgtgcagctccccaccaatactaaaaacatgtccacaggccaggctctatgcttctcatttaggcctcacaacattccagtgaagcagaggcttagaaaagtgatctcagttggcccaagatgacatgagtggtaaatgaagccactggagttcaaagtctggctctcacgtcagttaagcacaggccagattccctttctctccctccacatagctctcacctcctctggcctttttgctgatggcagaggtgtgctcctctttcttctttccaagggtacttcctcaaccctgctacagtccttatcaacacagcattcattctcagggaattgaaagctccaagtcacccttgttactggctccttccatcaagcagacacctcacctaacctggaacatcctttccaccatgctctccccttcatcaagctaactacctctgctcttttccattgtttcaaaacctcttgaaatgcagcagaaaggaaaaggaataaacatttattgagaacctattagacactttacagatgttatttaattctcacaaccttacctatgaattatccctgatttacaggtgagcaaacaggctcagagacacggaacttacggaggtctcagagccaataagcaaccaggagtaatctgactctaaaacatgtgctgcccccatgccacctccatgactctactctcccaaaggttgcttgtgtctactagccaaatccaaggccgccttctttgtcctcactcatctggtcctcagtgcctctaccacttacttcttcaacactcccctctccaggtcacaccctctctgaccttttattctcttgcatatgcatgttcctgagaacagcacttagtcctctttcactacccaatctgtactccctcgcaatctcatccttcatctctcctgattttcaaacatcctagactggatatttcagacacttaaaattcaacagatctcaagagaatatatttctcatgagcatcctccatggatctccctgacccggatctgtctgcctgttctaagtccagggctctttgcattatcctatgggatgaaaggcaccatcatggtctgcctggctgtggaaagcaagagggactcctgggctcatctgccctccataggcaggaacccaaatggggaaagaggaagggaactgtctaaaaaagttgctttctcaggttgtgtggagagacaggactcagtgaggataggcccctacaggcctatcaaccagccactctgtggctaaaagttaattgtccaataaaatttagctatcccaggataaggcatttctactttatacgattattctgttttaaaatatatttgctttgagagtaattccccaaatagaattcctattttctacagccttgctcttcttgttttatccttatcaatagtgccatcatccactgccctgacacctctgattccttcctttccctccatttcacaaaatctatcaattctacttagtgactctatcccactggtgttgaattctcccttttttttttaaacagcagaaacagtttattaaaatagaaatcttatgtagaacctttatgcataaaaaagattcaagctgcttcacttgaaaacaggaagcagcaccaaatccccccatactcaactccaacccttgcttgtctcaaggcacctacatagaaacccagagtgtctcagaagaacagctggagcgctacagcctgctctcttctgctgtccccactgcccccggctaggatcacctcctacaagattcctgcacagcctactgacttttctccctgctcaccctcttccatccctctaacccagctcctagcatctagtgcttcttggacttttgtaccaagtagccccaacagtaggagagaggtctggggataagtgaaatgaatatgactatttgaattaccactatcagttttagtatcttgaggcttcaagaactgctctacctagcaccaccaccttccctaaggacataagtacgtactctagactgaaaggttctactatacaccatctaatctgatcattccccggttcctcattacttacgagagaaaaatccaaatttcttattttagcattcaaggcactttacatgcagggctctacttccaagctggggcatgtggttccagagaaagagaggatacctcaggacagtatgatacatcttacctaatggtaagtaatttaaaatattaaatttatattaaataggtaatatggtgttaaaatgcaacacctacgtgaatttgtaaggcaaaacagtacttcaaagaaatgtatatgcagtgagacatttctagctttatttccagatccctttcaacccaggtaccatttaatctctgtaattaggtgtactctggtggaacactcaccattttttagatgaggaaacagggtcagaaaggtcaagtgacctatccaaggtcacacaactagcaagcagttaagctagacttttactgtaggcagtctgcctccagtcccgctcctaaccactgtactgtattatctcctcaaatgcattagaatcttcacttccataaagaaatatgctctttgtttttttcttttggaacacaaggtttagtccatcactcactcacttttccacttttgataagatgtaaatattgagaactatttctcttctccagtagaagaagagcaacaggccatgtgtgatggtaaatggcagctgacacttgcgacagtatcaagaaggcactaaggaatggtgagaaggatgacttgccctttctaaagtggcatctcagcttgagtctgcagaatgccttgcaaatccagctcagtactgctagataatccatattgacaagagaagctaaagattcagattttctatgtgaagtttcctggttttaaaatgttagcaacaaattccaaatttttacagaacactgtacaggccagaaagaacaatctgtgtgctaccagtttacaattagctatgcttcttcctcctcagacctggcatgccctttccacccccttgcctttgctcttagtaccccgtgtacactccaacctcttccacctacaaatttctaaatgcacagttcaaatgttagttcttcagattcctgtctctgtaataacacttgcccctttgtataacagttctcatgtatatcttcctattagaccatgagctcctgtggtagaaattgtgtattcattactgtatccctagtgtgcagtaaaggatcacagtag

SEQ ID NO: 22626 - DNA, 6033 bp, Homo Sapiens
aaactttgtctggataaggcgcacgcttggcgacgtcgaaggtccgtccgcagttaaggaagcttttgcagccggacaggtcgcgaagcacacatggggcagggtccgcgctctccacacaaggtggggcgccggttcccagctggtggcaaacgggggcgcggggccaaggggtcggggcgccccttaccaggccgtaagcggcaaccctggccgcctccggatgggcgctcggagccggctccagattcgcacccgcacctgagcccggaagctctgggatatttccgccgggcgctgtcagcattgaaagaggctcccgagactggggaagaacgagatctgatggtgcacaatataatgaaggaagtagagactcaggccctagctttgtccacgaacaggactggcagtgagatgctgcaggaactgttgggattcagtcccttgaaaccgctttgtcgcgtgtgggctgctctgcgctctaacttgcgcactgtggcctgtcaccgatgcggggtccatgtattacaaagtgctttgctacagctccctcgattgctggggagtgctgcagaggaggaggaggaggaggaggaggatggaaaggatggtcccacggagaccctggaggagctggtcctgggactagccgctgaggtgtgtgatgattttcttgtctactgtggagacacacatggcagcttcgtggtcagaactctgcttcaggtgttaggagggactattctggagtctgagagagccaggccccgtggttcccaatcatctgaagcacagaagaccccagctcaggaatgtaagccagctgattttgaagtccctgaaacctttttgaatcgccttcaggacctgagctcctcctttctgaaggacattgcagtgtttatcactgataagatctccagcttctgtcttcaagtggctttacaggttttacaccgcaaacttccccagttttgcgctcatctctgcaatgctgtgattggctacctgagtactcgcggttcctcagtagatggcagtcccctactgctatttctccgagatcagacgagttccagactcctggagcaggtcctgctggtgttggagcccccaagactccagagcctctttgaggagcacttgcaggggcagctgcagaccctggctgcacatcccattgccaacttccctttgcagcgcttactggatgcagtcactacccctgagctgctgtcccctgtgtttgaggagctgagccctgtcttggaagctgtattggcccagggccacccaggggtagtcattgccctggtgggggcctgtcgcagagttggggcctaccaagccaaggtcctacagctcttgttggaggcattccactgtgcagagccctcatcccggcaagtggcctgtgtgcctctctttgccactttgatggcttatgaggtgtactatggactgacggaggaggagggggcagtgcctgcagagcaccaggtggcaatggccgcagccagagccttgggggatgtgacagtccttgggtctctactgctccagcatctgctgcacttctccactcctggtcttgtacttcgaagtctgggtgccttgacgggaccacagcttctgtcccttgcccaaagtcccgctggctctcatgtgctcgatgccatcctgaccagcccctctgtgacgcgcaagctgcgccgccgtgtgctgcagaacctaaagggacaatatgtggctctggcctgtagtcgccatggcagccgtgtgctagatgccatctggagtggagcagccttgagggcccggaaggaaattgctgctgagcttggggagcagaaccaggagctgataagagaccctttcggccaccatgtggctcgaaatgtggccttgactaccttcctaaagcggcgagaggcttgggaacagcagcagggtgcggtggccaagcggaggcgggcattgaactccatacttgaagactgaggctttggatctgggactgggtgttgatgggggagggcaaaatggggtatccaccccatccctttcctggtttaaattggagtcagaagtcttagtggtaaatatttgatatttttattggaaatgtttttgttagtttgaggggaagggtatgaagacagatctcaaggtaaagtcagagagggctgtcatcagtatgctggggagtttagggacaggaggcattggtaggggattagatgtagcagcagtcaggctgggatcaagatgcctgggggacatcttgatcttggcctttcagggcaagtgggaggccagaaaggtggctaggaaagaacagcattcttcaggtaagggtatagacttgggatgtgaggcgttatgctgaaaggttctgtcacgaggggatcagaggacagtggggaaattgggtgggttatctagcctgtactgtctgcaggtcctgaaatttgatgctgtcatagtctttgcagtgggtcggttggaatgattctgggggcagaagctcagagccccttagtaggaatggaggcggcccttctgctgccactgctcagccccctccactgcatgacgaagggtggaggaaattcccagcaacatatggcccaggccttgcagcagtgtggaggtccaacgaaggagctccctgaatggcagagacaagaggaaatcagatgatttggaaaacttgggaggaagccatcaagctgggagatgaggactttccacaagcaagagctaactaggggtaggtgggtgcaagaggacgaattatggggactatccaactgtaggggatggggcagtatgacatgttgatttctgacctgagtactttctttgggccaagtccttgaaagtcacaactcatagagtagagcccgtagaatgtggctttgacattcaggctgccaaagaggtctcgagggttttgcttgtacacgtcaaaggtgaatcgggcgatgtccttgctgtgcttgggcctctcccgtcccaggccatatgacagcactccactctgtaggacacccttgtcagtgcagtagatcctcataccagacacccaccactaatctccatcagcactgggtcagaccctccctcgcttggactttctgtccactgtgtgacatccttgacaattccacaactcctcctgcacctggtccccaggatcagggttaagctagagaggaagcccgggaaagctctaaaggacaggcattggaagcagccccagtataggcctcttacccttgtagggctccagctctgaccagactgcaacaccatcaggcacgtgtcatcctccagcagctggaagaagtcctcactgtccactgcagttccatcctcctctagcaccagggttagcactccattcagcagtagggtctccaatgcctgcccaatggcaagaagcaagaagggcaggtcttatcccatgccccttccctctttagctgcccaacatccatcagttggctctagacattggtcgatgtcccactttgactttccggcactttgatacctcctaaaggttgcagctctccgtgttcttcagtttttgggggatcctagctagaggctgacctttttcctctttgctcctaccatgtcattggcatctccccttgctcccctccaagtcacttctggtttggaattggaaagcaagccaggttctcacgaagtccacccttctgtcttatctacaatgctgcacctcacttcccacaccctcaagagttctccagaagtgttttcagtaatagtgtttaacctttttgagtccttactctgtgccaggtatgaggactttacctacattatcctcttactcctttcaacaaccctaggaggtgatgtattattattgcctttttatagttgaagaaactgaggttttggtaggttgaacaacttcccaaggtttgacaggcaggaagtggcagaatcagaatttgaacttgatttgtcacacaaatcacctttccatactagcttctgaattctgtccctcgaactctccctatctcctgctaacccctgctcccatagaaaagctcactcggtggaaaatgaacaaattgaccagagctcattaggcccactccgctgcttttagccctcagagggaggggcagctgtgtgacttcagccctctgctccatcatcacaagttgccactgttgtggagccccttggctacccctgctataggaaccgaggaacttggcctacttactttggctagcagctcctggcgggtggcagctgtcaggcctttccggatggtccgcttgtgatcacagacacggaaaggtcgctggggtggtggagctgaggtccagaccctccgtccaaactccgagcttatattagatactgacctggtagttgagaagaaaagtcaagaaggggcgaggaggggcttggtgagtgtaaagggcatgatgagggtagagtggctagagggctagggagggagagatctaggtttatcgattagggatgagggagagaccatggagtgcaggtgggggcgggtggctcaggagcttgacaagcccactgtggagtggggagcaggagaggaaggggtactggttagtctcctaggggctgagtggagtattgttgccctgcctatatcccctaaaggtggagggtagagcggagggttagcagtcacctgagtaagtcactggggttcagagctgagaggtactccatggtggaccggagagttccttccctggaacttctgggctgggtggttctctcctgtgctggggctttagtggtgttttctgttacaaacctgggatctcagcccaggacaaggtgggaatgagtcaagcctggactctggcccccctgcctggccagtaagaagggcaaagtccaaggggagggatgagggaggggccagatggggtcctggaggaagaattgcctggcaaaagccattggagcttgtatgtgtgtctttggtgatgacatgtgttgtgagggtagatgggaaccatgtaaaaggatgaaatgtgacttctggtgtttttttatttctatggagggaatttctggggacggtttctggctctcaggctctgagaagctgcagtttatgagtggctctgtgtgtgctgccacctactggagaagccataagctgcagctttaggaaaagggaacccggggcagagtgtggggaagtgggatggcagcatggcagggctttggaaaatgagaggtgagactgtgtccaggaagggtgtaaggagaggatggatcctgatacatggattcaggatcattagggtcctgtctgggacactggccttcctgcttacctgctctttccttcctccttggtcggaggaggggctggctcactgctctggcttcattttccagagctgcctgctgcagtcacacttaggtcatcttctctcacttttctccttttgctgattagtggacgtgacagagatgtgaatggggcagggatgtcctttgatggcatcaagactttagcttctggtgcgctgtgtcccagctctgatttcagttgcagccgtgatggacagttgcatggaagctgagactctcactgacagtgaaaccctcaaatgaacacaatccctgctttcctgccaaggatccttgtagggtcccccagcttccccactttttttctgtgtcctgacaaagaaacacagagtaacttgattgccctgtgacctggccagttgcatttcccctgcaggcttgagcccaagccagagccttgaaaaggtattcaggttgttgcccaaaacactgaaaaaaactggccctggccctgaaccaaataccttgaaccctcgtaaactccataccctgacccccttgttttggatatacccaggtagaacaactctctctcactgtctgttgtgaggatacgctgtagcccactcattaagtacattctcctaataaatgctttggactgat

SEQ ID NO: 22627 - DNA, 6739 bp, Homo Sapiens
gcttgagagacaagttattgatgctgaacgtcaagcagaaaaagcttttcaacaggtacaagttatggaagataaattaaaagcagctaatattcaaaccagtgaatcagagacaagattatataataagtgtcaagatctggagtcgctaatacaggaaaaagatgacgtcattcaaaacttggaattgcaacttgaagagcagaaacaaataagaatacaagaagctaaaataatagaagagaaagcagctaagataaaagaatgggtaacagttaagttaaatgagctggaattggagaatcagaatcttcgtttgatcaaccaaaaccaaactgaagagataagaacaatgcagtcaaaactacaagaagttcaaggaaagaagtcatccactgtctctacactaaagctttcggaaggccagcgcctgagcagtttgacctttgggtgctttttatctcgagcaaggagtcctcctcaagtagtaaaatctgaggaaatgagcaagatatcatcgaaagaacctgagttcactgaaggaaaagacatggaagaaatggaaattccagaaaagtctgttgataaccaagttctagaaaacaacagaggccagagaacattgcatcaaaccccttgtggctcagaacagaatcggaaaacaagaacaagctttgccacagatggtggcatctcccagaattctggggctcctgtgagtgactggagctctgatgaggaagacgggagcaaaggaagatccaagtccagatgcacatccaccctctccagtcacacatctgaggaaggggtccagtgtagcaggatgggaagtgaaatgtatctgacagcatctgatgacagcagctctatatttgaggaagagacttttggcataaagagaccagaacacaagaagctatattcttggcagcaggaggcacagtggaaagctctaaatagtcctcttggaaagggaaattctgaattaagtaaaaaggaacaagatagttcctcggatgaactgaataaaaaatttcaatcccagagactcgattattcatcttcatcgagtgaagccaacaccccaagccctattttgaccccagctttaatgccaaagcatcctaactcactctctggaaaaggaacacaattagtgccttcatcacacctgccacccccaaagttaaggattcctaatgttttcagtataagtgtagcactagccaaaaggcacttaagccagccacagttaagctctgacaggatgtttggtacaaatagaaacgctataagcatgatacgaccactgagacctcaggaaactgatcttgatctagttgatggagacagtacagaagttttagagaatatggacacgagttgtgatgatggattattttcctatgactccttggactctccaaattcagatgaccaggaacactgtgactcagcaaagaaggtggcatacagcaaacctccaactcctcccctgcaccgttttccttcttgggaaagcagaatttatgctgtagccaaatcaggtattcgaatgtctgaggccttcaatatggagagtgttaataaaaattctgctgcaaccctttcctatactacatcaggactttatacatctctgatatacaagaacatgaccaccccagtgtatacaactttgaaggggaaggcgacccaaataagtagcagccctttcctggatgactcatctgggtcagaggaagaagacagctccagatccagctcccggacgtcagagtcagactcacgcagtaggagtgggccaggcagccccagagccatgaaacgaggtgtgtctctctcctctgtggcttctgaaagtgattatgctattcctcctgatgcttactccacagacacggagtactcacagccagagcagaagctcccaaaaacttgctcatcttccagtgataatgggaaaaatgaaccactggaaaaatctggttatttattaaaaatgagtggtaaagtcaagtcttggaagcggcggtggtttgttcttaaaggtggtgaattactttactacaaatctccgagtgatgtaattagaaaaccccagggccatattgaacttagtgcatcctgtagtattttaagaggagataacaaacaaacagttcagttgaccactgaaaaacacacatactatctgactgcagattctcccaatatattggaagagtggattaaagtgttacagaatgttcttcgagtacaagctgccaacccactttccctgcagcctgagggcaaacccaccatgaagggattgctcactaaggtaaaacatggatattccaagagagtctggtgtacactaataggaaagacattatattattttcggagtcaagaagataagtttcctttaggtcagatcaaactctgggaggctaaagtggaagaggttgacagatcttgtgattcagatgaagattatgaagccagtggacgaagtctgttatccacacattatactatcgttatccatcccaaagaccaaggtccaacttacctcctaattggatccaagcatgaaaaggacacttggctttatcatctgactgttgcagctggaagcaacaatgtaaacgttggatctgaatttgaacaactggtttgcaaattgctaaatatagacggggagccttcctctcagatatggagacaccccactttgtgtcacagtaaagaaggaatcatttcccctctgacaactctaccttccgaagccctgcagacagaagctattaaattatttaagacctgccagctttttataaatgctgcagttgactctcctgcaattgattaccacatatctttagcccagagtgctttgcaaatctgcctgacacatcctgagctgcagaatgaaatttgctgtcagcttattaaacagacaagacgaagacagccacagaatcaaccaggaccattgcagggctggcagctcttggcactctgcgttgggctcttccttccccatcatcctttcctgtggctcctcaggcttcacctaaagaggaatgcagattccaggacagaatttggaaaatatgccatttactgccagcgttgtgtagaaagaacgcaacaaaatggtgacagagaagcaagaccctcaaggatggaaattctttcaactcttctccgaaacccttatcaccattctttgccctttagtatacctgtgcacttcatgaatgggatataccaggtagttggttttgacgcatctaccacagtggaagaatttttgaatactttgaaccaggacacaggaatgaggaaaccagcgcagtctggatttgcgttgttcactgacgatccttctggcagagatttagagcattgtcttcaaggaaacatcaagatttgtgacattatttccaaatgggaacaggcttccaaagaacagcagcctggaaaatgtgaaggtacaaggactgttcgtctgacatacaaaaacagactatatttctcagtgcaagctcgtggagagactgatagagaaaagttgctgttaatgtatcagacaaatgatcaaatcataaatggactttttcctctgaacaaagatctggcattagaaatggcagctcttttatctcaggtagagattggagattttgaaagacctttctcaactccagcagggcatgttaccaatcagtgcaaagtgaatcaaactctaaagcaagtcatagagaaattttatcctaaaaggtatagagatggctgttctgaagagcagttaaggcagctttgccagcgactttcaaccagatggatggccctccggggacacagtgctgctgactgtgtgcgcatttatttgacagtagccaggaagtggccattctttggtgccaagttgtttcttgcaaaacccataactccatcatcacttggaagtactttcttgtggctggctgtacatgaggatggtttaagcctcttagaatacaactccatgaggttaatagtcagctatgtgtacaagagtctaatgacctttggaggctatcaagatgattttatggtagtcattaacaatacacattcaaaggacaaaccaacagagaaattactttttgccatggcaaaacccaagattcttgaaatcactcttttgatcgccagttacataaacaacttccatcagcaaaaggcagcatttcaccacctctctgctccagcactgctctcagcccagacccggggaccccaagccagaatgatgggaagccagcctcttctgtcaagcagcagaccgaccaaaggccccaccttactctgaaagctggggagcctgaacattcactccttgtcctccatgctgtggctgtatcagctccctacaagttcgtttacacctggcagcacggcagccacacaccggtattccaaaccttaacaatgaagggggttagtctcttttatttgattcttaaatattcaaataaatattaacagtaaaacataaacacaaaatttgccaacacactaattttcttatagagtaaatgagtaagaattcatcattttttccatctcccttctcccttgtcatcagacacattgtgcaatgtggcttttcttttcttttctttttttcccctttttaatattctggcaatctttagaaagggagattccaaactcccatttggtaaaccagttgattatttggaaatgttcactgccaaaatagtaagtgctataactaaatgcgcttttaattaatgatatagtgtttggaaaggagtagaacatgcagcataagaaactgctgcagagtggtgcgaggagtacattttcagagcaggtgcagtacatcttccggctctatgaatcattatgtgagaaagcaggataacattaggtaacctgagcctcctgtgtggtattagaaagtataccgtcaccttttcacatcactggagtgtaaaatttaaaacaagatggtgattcctgacattccttggctgtcagtgctgcccagattcagaagaatattgcccacatttcactgtatttggtgctgggtcattttgaccttgctttgttaataatatctttaaaaacaaagacaatccttaaagctttgctcctcacacattaccttctaattatagtttgaaaatagattccctacacatacatacatatgtatgcacagatagggtcttgctatgttgcccaggctggtcttgaactcctggcctcaagcaatcctctctcctcagcctcccaaagtgctgggattacaagtgtgagccaccacacctggctccagaaattttattttatttttttgaggcagggtctcactctggttgcccaggctggagtgcagtggtgccatcatagctcactgtagcctcgaccttccgggatcaagcaatcccacttcagcctcttgaatagctgggactagaagcatgcaccaccatgcccatctaatatttgtatttttagtagagacaggatctccctatgttgtccagcctagtctcaaactcctgggttcaagcaatcctcccacctcggcctcccaaagtgctgggattgcaggcatgagccaccgtgcccagcctcaaaaatattttttaaaagaaaagagaaaataattcttctgtcaaaggaggttaaattttagttgatagagtacttaaatgcattactttattaggttatgtaagtggtcagtgcattccagtatgtgtcacaacagtgtagttcatattcatgataaaaatgaaactgtgataagacatgaaaattatattattaaaatgttcaattgtaatggtaatcatgagtatacttaattttatttatgtatagaatatttgtatttattttttggacatatatttatcactttgtcattttttttaaccaatttgagaaatgttagctgctgaattaatttgttgcccgagccttcatattttcttctttgctgccttctccctgtggcaatgtactgttctcacattaagccttttaaaaatgttccatactgtattagcatccttagaagggacagaactaagaaatacattgctcaaataatattttactttattgataatgacaaaaagaatattttttaaaccccatcaaaatagatttcaattgactgtttcccctacatcttttgagccacagtcgcccatcgaataagcaaatttgtttttgagaataaactggtaaccagtttgtgatgactctcagaagccttttggctgggttacagaagagtttctaagttcctagagagccatttaataattagttggtgagccagaggcttgacagagctgttacttatgtgtgagggctttattctcaggcagtagtttattcatcatttggtaagcccctccccacactcctctaatttaaacaagtagtgaaggcttatcttaaactgtgtagtaccttagacttggcatttatttttgatagagcagagataaaatattttgatggaaggaaatcaattttctgtaactgatgatgtgaaaattttattttctgggaaattatatagccattcaaaaattcaaagtatgttattatgattggttacaagagaataatgttacatgtttaattgtaatatttgtctcctatcattttcttccctttcagtcataataaatgatttacaaaaccc

SEQ ID NO: 22628 - DNA, 3935 bp, Homo Sapiens
cccacgcgtccgggctagggcgccggagccgcacgcagccgcggggctccgagaggcgcgcactggggctgggactgcgcggcgccgccgctgcgagcgccactgagcggtcgcgcaacttcggaggcacagcgccggagccaggcgagcgctcagagacccggagccagaggggcgcgccggagcctcgttcgagagccggcgccaggcacccaccgcgctccgagtgccaggcggccctccgcgcagcgtggcttccgctgcccccacggaaggcacgggctggcgctgccgggcgccggggaggacggcgaggaggaggcggcggcggcggagacggcggcggcgagactggggccagggagacagccctgggggagaggcgcccgaaccaggccgcgggagcatgggggcccggagcggagctcggggcgcgctgctgctggcactgctgctctgctgggacccgaggctgagccaagcaggcactgattctggcagcgaggtgctccctgactccttcccgtcagcgccagcagagccgctgccctacttcctgcaggagccacaggacgcctacattgtgaagaacaagcctgtggagctccgctgccgcgccttccccgccacacagatctacttcaagtgcaacggcgagtgggtcagccagaacgaccacgtcacacaggaaggcctggatgaggccaccggcctgcgggtgcgcgaggtgcagatcgaggtgtcgcggcagcaggtggaggagctctttgggctggaggattactggtgccagtgcgtggcctggagctccgcgggcaccaccaagagtcgccgagcctacgtccgcatcgcctacctgcgcaagaacttcgatcaggagcctctgggcaaggaggtgcccctggaccatgaggttctcctgcagtgccgcccgccggagggggtgcctgtggccgaggtggaatggctcaagaatgaggatgtcatcgaccccacccaggacaccaacttcctgctcaccatcgaccacaacctcatcatccgccaggcccgcctgtcggacactgccaactatacctgcgtggccaagaacatcgtggccaaacgccggagcaccactgccaccgtcatcgtctacgtgaatggcggctggtccagctgggcagagtggtcaccctgctccaaccgctgtggccgaggctggcagaagcgcacccggacctgcaccaaccccgctccactcaacggaggggccttctgcgagggccaggcattccagaagaccgcctgcaccaccatctgcccagtcgatggggcgtggacggagtggagcaagtggtcagcctgcagcactgagtgtgcccactggcgtagccgcgagtgcatggcgcccccaccccagaacggaggccgtgactgcagcgggacgctgctcgactctaagaactgcacagatgggctgtgcatgcaaaataagaaaactctaagcgaccccaacagccacctgctggaggcctcaggggatgcggcgctgtatgcggggctcgtggtggccatcttcgtggtcgtggcaatcctcatggcggtgggggtggtggtgtaccgccgcaactgccgtgacttcgacacagacatcactgactcatctgctgccctgactggtggtttccaccccgtcaactttaagacggcaaggcccagcaacccgcagctcctacacccctctgtgcctcctgacctgacagccagcgccggcatctaccgcggacccgtgtatgccctgcaggactccaccgacaaaatccccatgaccaactctcctctgctggaccccttacccagccttaaggtcaaggtctacagctccagcaccacgggctctgggccaggcctggcagacggggctgacctgctgggggtcttgccgcctggcacataccctagcgatttcgcccgggacacccacttcctgcacctgcgcagcgccagcctcggttcccagcagctcttgggcctgccccgagacccagggagcagcgtcagcggcacctttggctgcctgggtgggaggctcagcatccccggcacaggggtcagcttgctggtgcccaatggagccattccccagggcaagttctacgagatgtatctactcatcaacaaggcagaaagtaccctcccgctttcagaagggacccagacagtattgagcccctcggtgacctgtggacccacaggcctcctgctgtgccgccccgtcatcctcaccatgccccactgtgccgaagtcagtgcccgtgactggatctttcagctcaagacccaggcccaccagggccactgggaggaggtggtgaccctggatgaggagaccctgaacacaccctgctactgccagctggagcccagggcctgtcacatcctgctggaccagctgggcacctacgtgttcacgggcgagtcctattcccgctcagcagtcaagcggctccagctggccgtcttcgcccccgccctctgcacctccctggagtacagcctccgggtctactgcctggaggacacgcctgtagcactgaaggaggtgctggagctggagcggactctgggcggatacttggtggaggagccgaaaccgctaatgttcaaggacagttaccacaacctgcgcctctccctccatgacctcccccatgcccattggaggagcaagctgctggccaaataccaggagatccccttctatcacatttggagtggcagccagaaggccctccactgcactttcaccctggagaggcacagcttggcctccacagagctcacctgcaagatctgcgtgcggcaagtggaaggggagggccagatattccagctgcataccactctggcagagacacctgctggctccctggacactctctgctctgcccctggcagcactgtcaccacccagctgggaccttatgccttcaagatcccactgtccatccgccagaagatatgcaacagcctagatgcccccaactcacggggcaatgactggcggatgttagcacagaagctctctatggaccggtacctgaattactttgccaccaaagcgagccccacgggtgtgatcctggacctctgggaagctctgcagcaggacgatggggacctcaacagcctggcgagtgccttggaggagatgggcaagagtgagatgctggtggctgtggccaccgacggggactgctgagcctcctgggacagcgggctggcagggactggcaggaggcaggtgcagggaggcctggggcagcctcctgatggggatgtttggcctctgcttcctcccagttcacagccagagttgcctctcctcctcctcttccccaacccccagaccatgaccagccttagaaaatccatgtactctgttgttagagggcccagagttccttctccacccccgctctctctctcttggcctgagatctctgtgcaggaaccaagatggggctgaagcctctggaggcagttggttgggggcgggcaggcaggaggccctccctccacccccccaccctcagcccggcaacttctgggttccatgggttttagttccgttctcgttttcttcctccgttattgatttctcctttctccctaagcccccttctgcttccacgcccttttcctctttgaagagtcaagtacaattcagacaaactgctttctcctgtccaaaagcaaaaaggcaaaggaaagaaagaaagcttcagaccgctagtaaggctcaaagaagaagaaaaacaccaaaaccacaagggaaaagaaaaacccagtttcttaggaaacgcaaacgatttattatccagattatttggataagtcctttttaagaaaaaaaaaagaaaatgaaaaacaacacaaaaaaaaaaaaaaaa

SEQ ID NO: 22629 - DNA, 2976 bp, Homo Sapiens
agacgtggcggctctcgcctgggctgtttcccggcttcatttctcccgactcagcttcccaccctgggctttccgaggtgctgtcgccgctgtccccaccactgcagccatgatctccttaacggacacgcagaaaattggaatgggattaacaggatttggagtgtttttcctgttctttggaatgattctcttttttgacaaagcactactggctattggaaatgttttatttgtagccggcttggcttttgtaattggtttagaaagaacattcagattcttcttccaaaaacataaaatgaaagctacaggtttttttctgggtggtgtatttgtagtccttattggttggcctttgataggcatgatcttcgaaatttatggattttttctcttgttcaggggcttctttcctgtcgttgttggctttattagaagagtgccagtccttggatccctcctaaatttacctggaattagatcatttgtagataaagttggagaaagcaacaatatggtataacaacaagtgaatttgaagactcatttaaaatattgtgttatttataaagtcatttgaagaatattcagcacaaaattaaattacatgaaatagcttgtaatgttctttacaggagtttaaaacgtatagcctacaaagtaccagcagcaaattagcaaagaagcagtgaaaacaggcttctactcaagtgaactaagaagaagtcagcaagcaaactgagagaggtgaaatccatgttaatgatgcttaagaaactcttgaaggctatttgtgttgtttttccacaatgtgcgaaactcagccatccttagagaactgtggtgcctgtttcttttctttttattttgaaggctcaggagcatccataggcatttgctttttagaaatgtccactgcaatggcaaaaatatttccagttgcactgtatctctggaagtgatgcatgaattcgattggattgtgtcattttaaagtattaaaaccaaggaaaccccaattttgatgtatggattacttttttttgtaaacatggttaaaataaaacttctgtggttcttctgaatcttaatatttcaaagccaggtgaaaatctgaactagatattctttgttggaatatgcaaaggtcattctttactaacttttagttactaaattatagctaagttttgtcagcagcatactccggaaagtctcatacttcttgggagtctgccctcctaagtatctgtctatatcattcattacgtgtaagtatttaacaaaaaagcattcttgaccatgaatgaagtagtttgtttcatagcttgtctcattgaatagtattattgaagatactaaatgatgcaaaccaaatggattttttccatgtcatgatgtaatttttctttcttctttcttttttttaaattttagcagtggcttattatttgtttttcataaattaaaataacttttgataatgtttactttaagacatgtaacatgttaaaaggttaaacttatggctgtttttaaagggctattcatttaatctgagttttcccttattttcagctttttcctagcatataatagtcattaagcatgacatatccttcatatgatcactcatcttgagttaattagaaaatacctgagttcacgtgctaaagtcatttcactgtaataaactgactatggtttcttaagaacatgacactaaaaaaaaagtggtttttttccaccgttgctgattattagacagtaggaaatagctgttttctttagttttacaagatgtgacagctttagtggtagatgtagggaaacatttcaacagccatagtactatttgttttaccactgattgcactgttttgtttttttaacagttgcaaagctttttaatgcataaaagtataattgaaatctgtggtatttatttacaaacatgtctacaaaaatagattacagcttattttatttttagttaaatctcttaatacacagagaactcccaatcttgctcatctaaataaggaaagacttggtgtatagtgtgatggtttagtcttaaggattaagacatttttggtacttgcatttgacttacgatgtatctgtgaaaatgggatgatattgacaaatggagactcctacctcaatagttaatggaataataagaggctactgttgtgtctaatgttcttcaaaaaagtaatatcctcacttggagagtgtcaaatacatactttgaggattgactttatataaggtgccctgtagaaatctgttacacatatttttgacccatattatttacaatgtcttgataattctacctttttagagcaagaatagtatctgctaatgtaagggacatctgtatttaactcctttgtagacatgaatttctatcaaaatgttctttgcactgtaacagagattccttttttcaataatcttaattcaaaagcattattagacttgaaagggtttgataatctcccagtccttagtaaagattgagagaggctggagcagttttcagttttaaatgagtctgcagttaatatcaaatgtgagtttgggactgcctggcaacatttatatttcttattcagaacccttgatgagactatttttaaacatactagtctgctgatagaaagcactatacatcctattgtttctttctttccaaaatcagccttctgtctgtaacaaaaatgtactttatagagatggaggaaaaggtctaatactacatagccttaagtgtttctgtcattgttcaagtgtattttctgtaacagaaacatatttggaatgtttttcttttccccttataaattgtaattcctgaaatactgctgctttaaaaagtcccactgtcagattatattatctaacaattgaatattgtaaatatacttgtcttacctctcaataaaagggtacttttctatt

SEQ ID NO: 22630 - DNA, 1916 bp, Homo Sapiens
atggtaacggctcggaagcctaggaggctgggccggagggaggcggaggaaccggtgttcgccgccgccgctgcttcagcttattccttgtggcctctgcgggtcctgcctcagccatgatgatccacggcttccagagcagccaccgggatttctgcttcgggccctggaagctgacggcgtccaagacccacatcatgaagtcggcggatgtggagaaattagccgatgaattacatatgccatctctccctgaaatgatgtttggagacaacgttttaagaatccagcatgggtctggctttggaattgagttcaatgctacagatgcgttaagatgtgtaaacaactaccaaggaatgcttaaagtggcctgtgctgaagagtggcaagaaagcaggacggagggtgaacactccaaagaggttattaaaccatatgattggacctatacaacagattataagggaaccttacttggagaatctcttaagttaaaggttgtacctacaacagatcatatagatacagaaaaattgaaagccagagaacagattaagttttttgaagaagttctcctttttgaggatgaacttcatgatcatggagtttcaagcctgagtgtgaagattagagtaatgccttctagctttttcctgctgttgcggtttttcttgagaattgatggggtgcttatcagaatgaatgacacgagactttaccatgaggctgacaagacctacatgttacgagaatatacgtcacgagaaagcaaaatttctagtttgatgcatgttccaccttccctcttcacggaacctaatgaaatatcccagtatttaccaataaaggaagcagtttgtgagaagctaatatttccagaaagaattgatcctaacccagcagactcacaaaaaagtacacaagtggaataaaatgtgatacaacatatactcactatggaatctgactggacaccttggctatttgtaaggggttatttttattatgagaattaattgccttgtttatgtacagattttctgtagccttaaaggaaaaaaaaataaagatcgttacaggcaggtttcactcaactgctatttgtactgtctgtcttcacattcatattccagatttatattttctggagttaaatttggatgatttctaaattatcacaaagtgggacctcagcagtagtgatgtgtgtgtctcatgagcagtgagcacagtctgcattcatcatgaaacactatcttctaccaggaggaggttaatgtaaatcaccaaatcccaatgccttgtgactttcataggattcctgatcatgcatgttgatgtactggctcttcactttgggctttctgatgtttattcacacctttggagagttgcaacttgccacatacgaaattagtctcatagtgtagtgaacttcaaccccaaaattttaaaaatgtatttccccccagttttaaattgcctttgaaatttaaaaaaaaaaatttagacttagtaccagaaccaaaaatacctagatttttggagaacttattacatacatagaaacatgaatatggtttaccwctgtgtgtgtgtgtgtgtgtgtgtgtatacagacttttttttttaacttgttgattcagatgtcttggtccctgaatagtcctagattacttattttgagaattgattgttaaaaattacagggaattaaaataattgcctttttttttttagagggtaagagatgggtagaagagtatgcctctgaaaattttattagtttattcttgtggagaataccaagaaaatgtgtatttgcccattgctaaatatgatatatgccattttgtatttatttgtcccaagtgtctttttttaagaggagaataaacaataaggaattactg

SEQ ID NO: 22631 - DNA, 1807 bp, Homo Sapiens
atttttgctggagcctgcgaccgagtgggagtggagtggagcgactgtggttgccgactctttcctcttccccacggtccagtcagcgggttaattaggccatcggccctcgagccgagacttgtctcttatctagttctggggagcgcctcgtcaacatgagtgatgtggaggaaaacaacttcgagggcagagagtctcgctctcagtcaaaatctccaacgggaactcctgctcgtgtaaaatcggagagcaggtcaggatctcgtagtccatcaagggtttccaaacactctgaatcccattctcgatcaagatcaaaatccaggtcgaggtcaaggagacattctcatagacgttacactcgatccagatcccactctcactctcataggagacgatctcgaagtagatcatatacaccagaataccggcggcgaaggagccgaagccattctccaatgtctaaccggagaagacatactggcagcagggcaaatccagatcccaacacttgccttggagtgtttggcctcagtttgtacacaacagagagggatcttcgtgaagtattttctcgatatggaccattgagtggtgtcaatgtggtttatgatcagcgaactgggcgatctcgaggatttgcttttgtgtattttgagagaatagatgactcaaaggaggctatggaaagggcaaatggaatggagctggatggtagaagaattcgggtggattattctataaccaagagagcgcacacaccaacaccaggcatctacatgggcagaccaactcatagtggtgggggtggtggaggaggcggcggcggtggaggtggaggtggtggcagacgtcgagattcttactatgatagaggatatgatcgtgggtatgacagatatgaagactatgattaccgatacagaagacgatcaccttctccttattatagtcgatatagatcacgatcaagatctcgttcctacagcccaagacgctattgataacggaatggttgcaattaaggacattttttttcctctttttttttttttttttttttaattctgagatttccccaagctgtggattgttcctactccttaagaaaaaaactttggtttatttagcatctacacttttgtcagttgtgttgctgttttccacccattttattatactcttaaaagatgtaattgttgtcattttgaacagttaaacatcttgagtataaaaagaaccccaatgttatgttatgctttgtaaattttttttttgcttttacctagataaacttctagctaatcaaataaggaaagaaactgtctttttaaagcttcttttgtgttagatactgtattagagatctgcatttatcatgagttcctttttttttttaactttatttttgggaaagtaacacatgaagtagttcagtcatgtcaggtttgtctggggtggaatggaacagtcaggtagttgaaagtttttttttagagatgaaaagcttgtgaactcctgtaaaacatgctgtatttgaaatacatctgttaaaacttaaaaactaaagtgtgattttttttgttgttgttaagtttattgaagtttattcccttaatcagtgaaggacaacccttatttattacctagagcagttgtataattcgctgttagaaattttggtattgggacagtggataagcaggttatcacatagcatagaattcttaaaagatacatgtggggaaaagtagtctcaaataaaagctaatttctttgaaaaaaaaaaaaaaaaaaaaaaaaa

SEQ ID NO: 22632 - DNA, 3567 bp, Homo Sapiens
actgggcccgggacgcgccggcggcggcggagactccggggctgcggcgccgcccgccccgcccgcagagtccggctgccgcgcatcgtccgcagacgccgccaccgccatgggctcctgaggctagcttgtcactttctgcaaaggtttccctcagggagcctcctgctgccaggcaccatgacagtgaggggggatgtgctggccccggatccagcgtcgcccacgaccgcagcagcctcgcccagcgtctccgtgatccccgagggcagccccactgccatggagcagcctgtgttcctgatgacaactgccgctcaggccatctctggcttcttcgtgtggacggccctgctcatcacatgccaccagatctacatgcacctgcgctgctacagctgccccaacgagcagcgctacatcgtgcgcatcctcttcatcgtgcccatctacgcctttgactcctggctcagcctcctcttcttcaccaacgaccagtactacgtgtacttcggcaccgtccgcgactgctatgaggccttggtcatctataatttcctgagcctgtgctatgagtacctaggaggagaaagttccatcatgtcggagatcagaggaaaacccattgagtccagctgtatgtatggcacctgctgcctctggggaaagacttattccatcggatttctgaggttctgcaaacaggccaccctgcagttctgtgtggtgaagccactcatggcggtcagcactgtggtcctccaggccttcggcaagtaccgggatggggactttgacgtcaccagtggctacctctacgtgaccatcatctacaacatctccgtcagcctggccctctacgccctcttcctcttctacttcgccacccgggagctgctcagcccctacagccccgtcctcaagttcttcatggtcaagtccgtcttctttctttccttctggcaaggcatgctcctggccatcctggagaagtgtggggccatccccaaaatccactcggcccgcgtgtcggtgggcgagggcaccgtggctgccggctaccaggacttcatcatctgtgtggagatgttctttgcagccctggccctgcggcacgccttcacctacaaggtctatgctgacaagaggctggacgcacaaggccgctgtgcccccatgaagagcatctccagcagcctcaaggagaccatgaacccgcacgacatcgtgcaggacgccatccacaacttctcacctgcctaccagcagtacacgcagcagtccaccctggagcctgggcccacctggcgtggtggcgcccacggcctctcccgctcccacagcctcagtggcgcccgcgacaacgagaagactctcctgctcagctctgatgatgaattctaggtgcgggctgcagtggcggaagtgctggcgccatagccacggtcaggctgtgccccacctccagcctcaccaccaggccaggaggcagctggcacagtgctcacgccgcctttatttattggaccagaaacactcacatgtcacttccagaggaacgggggacagccaggctcgcccatgggccttcaggaatatttatacatggcccagcctgcactgcccgggcgagggcagaggacactgggagcaaggcttatgcccctgctgcccgtcctgtgctgggggcatgctgggaccagccgcacccaggccccaatgcttgtgtgtggaccagcggctgcagccttctagcccctcctccccgcgagactctcaggctgaggtcggcaagccgtggctcccccacacaccgtgcaataccctgtctgacctgggctcttcccgcctgcatccctcccctgtccacctttgtccagtgctagattcacctcaccccgggcaggagtggggatgtgggcgctctgtggtcctcccctcctgacccaggcctctgtggcatgctgcaaggatcagagccagacaccaggagtcacaggccccacccaggaagggcattcagggcccctgggcaccgcttctgttgaagcaggggcttctgggcccctgggtatccccacctgtcgtggccacacctctgcctgcctcatgccccttccccctggcctaccaaggacagcccacagcccgcactgccggctcacttgggtccttcctcgatagctttgggcagagcccttgcttcctggctgcttcagggctcaggggctcccagccctccttcccaggctgatgctgggtcctctctctctttggggcttctccctcccgtttcaggggaaaggtctgagtctccacgtttcagaccagcttctgggggaaggcagtccggcagggagaccgggaggggtggccacacagtggggagctgggaggtggggggaatggtcccagactcctctcggggcccctatccacacagggcctggtgttctaccccatctggcccctggcccatctcttctgtgccttagtcacatatgaaagcgcccctccctggctccccatctgtcccacacgctccctggggctcttagttcagctgctggcactcgcaggatcctgcagtgctgggcccagagcccttggacaggcctcaggagtggtcaggaccaccaagcccctcctctccccctccacacctctagacctggggcctccggaacccccagcaggctgggcttatactagctcctgacttaggaagagcctcgtgtcacaacacgtgtccctacaggcaaagtgtcctggcatttaaaacccagattatccctgggtttgggctgcagtcacctggagaagctggtagggtaagggagagggaccctgccggtgttcactggggattctttcttttggtccttcctggaatgaacaggttccctccctgccacctgtgaggagagttggggcccagccgtcttcctggcctccttcctttcctcgtggcagaggcctgcatgtgggtgccagaggccagctctccccctccatcttgggggggcggagcagttgggcccaagctgcccgggagggtgggtgcagacacaggctgaggaccagccctggccctgccccgccatctgctttcaccaagctgtctctccaccgtggcttcccttctccctccaggccaaagtgctgctgattcccactcccttggttttcgcctgcccagcgttgctgtttgcgtggagggtggggggagctcagtggcagggaatcagcggtccgtggggtcgtggggacgggaacatgtgcccgaccgctccatcccctcctcctccttaggatgcataacctaccttgtctttttttttttttaaattttctttccaggtagagtagctctttgtacataaagaatacttgaaaaattaattgtatgatgtatgagaagacagagtctcctagttttgtatcttgttgtatgactgccatgagttccaccagaaagccactctattttggtctctgtgacattttaaatgcgtgacagaagtgagcaaataaagtgaggaagaaatctaaaaaaaaaaaaaaaaa

SEQ ID NO: 22633 - DNA, 3016 bp, Homo Sapiens
caacgagttgtagccgcggagagcaggcgtcgatgctggcgcccaaagcctccagcctgagagtcgcctcactcgtgtgacgacagagtttcactcctgttacccaggctggaggacagtgatgtgatctcgggtcaccacaacctccgcctcccggattcaggcgattctcatgcctcagcctcccgagtagctcagattacaggcatgtgccaccacgcccggctaattttgtattttcagtcgagacggggtttccccatgttggtcaggctggtcttgaattcccgacctcaggtgatctgttcgcctcggcctcccaaagtgctgggattacaggcgtgaaccactgcacccggcgaggcattttttactgtctacagaaacttattgtaattcatttttcctcactccagtagtaagaattataccaaattgaaaagatatgaatgagtatcctaaaaaaagaaaaaggaagactctacacccttctcgttattcagattcctctggaataagcagaattgcagatggattcaatggaattttctctgatcattgttacagtgtctgttctatgagacagccagatttaaaatattttgacaacaaagatgatgattctgataccgagacgtcaaatgacttgccaaaatttgcagatggaatcaaggccagaaacagaaatcagaactacctggttcccagtcctgtacttagaattctagaccacactgccttttctacagaaaaatctgctgatattgtaatttgtgatgaagagtgtgactcacctgaatcagtcaaccagcaaacccaagaggagagtcctatagaagttcacactgctgaagatgttccaattgctgtagaagtgcatgcgatttctgaggattatgatatagagacagaaaacaattcctctgagagtctccaagaccaaactgatgaagaaccgccagctaaactttgtaaaattcttgacaagagccaagctttgaatgtgactgcccagcagaaatggcctttactgagagctaatagcagtggcctctataaatgtgaactttgtgagtttaacagcaaatatttttctgacttaaagcagcatatgatcctgaagcataaacgtactgattcaaatgtgtgtcgagtatgcaaggaaagtttctctaccaatatgcttctgatagaacatgccaaactgcatgaagaggatccctacatttgtaaatactgtgattataagacagtaatttttgagaacctcagccagcacattgcagacacccattttagtgatcacctctattggtgtgaacagtgtgatgtacagttctcctcaagcagtgaactctacctacatttccaggagcacagctgtgatgaacagtacttgtgtcagttctgtgaacatgaaactaatgatccagaagacttgcatagccatgtggtaaatgagcatgcatgtaaattaatagagttaagtgataagtataacaatggtgaacatggacaatatagcctcttaagcaaaattacctttgacaaatgtaaaaacttctttgtatgtcaagtatgtggttttcggagtagacttcacacaaatgttaacaggcatgttgctattgaacatacaaaaatttttcctcatgtttgtgatgactgtgggaaaggcttttcaagtatgctagaatattgcaagcatttaaattcacatttatctgaagggatttatttatgtcaatattgtgaatattcaacaggacaaattgaagatcttaaaattcatctagatttcaagcattcagctgacttgcctcataaatgtagtgactgcttgatgaggtttggaaatgaaagggaattaataagtcaccttccagtccatgagacaacttgattattctctttaacttacagaatgttagtttaaaataataaattcatcctttttttggagatgattaaatggatgattgtaaacacaacttatgaaatctgcctttaacaagtaacttttttaaattataaaattttattggcattgctccattttctgtatataaatatatctttaatgtggtattttcaattgcgtgatagtttgtagtttcaaccactcttggtgactgtcatcctgtttcttccatattctctgatttcatgaattgaaaagaaacaaatgtattgaagaagtgagctacagttttccttccttaaccatgggtgctagtaactttttaaaactcaagacaagattagttttttatgtgtgaagtcattaaattattacacgaccagaactaaaatgcaatatacagttaagtccacggatactcccattaatgagaaataacactaggaagccactattacaggaagaaaagatttggttttcatggcagtctgtttttttaaaaaaaaatttttgagccactatctattgttgaatattttaagatgggatgagggaggaactaataagggcttacacaataaaaaataactatatcataactcattcataacttgatgtttcattttctgttgaggaaccataaattcattcacagacttaatatttttttcttagagatggtctcgttctgttgtccaggatggagtgcagtggttgatcatagctcccgggccgtagtctcccaggctcgagcaatcctcccacttcaccctcctgcatagctaggactacaggcatgtggcaccatgcccgctaagtttttaaatttcttgtagagatgagatctcgctatgttgcccaggccagtctcaaactcctggactcaagcaatcctcccaccttggccttccaaatcactgggattataggcatgagccattatgcctgactcttgcccaaatttctgatgtcaaattgttcattgacagaaaacccactgaagtatttaaagttaggaagatctgggagataggggttgctggcatgaaaatgtataacttacaacatttattaataaaatgataaattagcatc

SEQ ID NO: 22634 - DNA, 6894 bp, Homo Sapiens
tgacccggtccgtgtgggccagcgggaaggaagccagttgagggaagttctccatgaatgtacgtcacaatgatgatgaccgaccaaatccctctggaactgccaccattgctgaacggagaggtagccatgatgccccacttggtgaatggagatgcagctcagcaggttattctcgttcaagttaatccaggtgagactttcacaataagagcagaggatggaacacttcagtgcattcaaggacctgctgaagttcccatgatgtcacccaatggatccattcctcccattcatgtgcctccaggttatatctcacaggtgattgaagatagtactggagtccgccgggtggtggtcacaccccagtctcctgagtgttatcccccaagctacccctcagccatgtctccaacccatcatctccctccctatctgactcaccatccacattttattcataactcacacacggcttactacccacctgttaccggacctggagatatgccgcctcagttttttccccagcatcatcttccccacacaatatatggtgagcaagaaattataccattttatggaatgtcaagctacatcacccgagaagaccagtacagcaagcctccgcacaaaaaactgaaagaccgccagatcgatcgccagaaccgactcaacagacctccttctgctatctacaaaagcagctgcacaacagtatacaatggctatgggaagggccatagtggtggaagtggcggaggcggcagcggtagtggtcccggaattaagaaaacagagcgacgagcaagaagcagcccaaagtcgaatgattcagacttgcaagaatatgagttggaagtaaagagggtgcaagacattctttcgggaatagagaaaccacaggtttctaatattcaggcaagagcagttgtgttgtcctgggctccccctgttggactttcctgtggaccccacagtggtctttccttcccctacagttacgaggtggccttatcagacaaaggacgagatggaaaatacaagataatttacagtggagaagaattagaatgtaacctgaaagatcttagaccagcaacagattatcatgtgagggtgtatgccatgtacaattccgtaaagggatcctgctccgagcctgttagcttcaccacccacagctgtgcacccgagtgtcctttcccccctaagctggcacataggagcaaaagttcactaaccctgcagtggaaggcaccaattgacaacggttcaaaaatcaccaactaccttttagagtgggatgagggaaaaagaaatagtggtttcagacagtgcttcttcgggagccagaagcactgcaagttgacaaagctttgtccggcaatggggtacacattcaggctggccgctcgaaacgacattggtaccagtggttatagccaagaggtggtgtgctacacattaggaaatatccctcagatgccttctgcaccaaggctggttcgagctggcatcacatgggtcacgttgcagtggagtaagccagaaggctgttcacccgaggaagtgatcacctacaccttggaaattcaggaggatgaaaatgataaccttttccacccaaaatacactggagaggatttaacctgtactgtgaaaaatctcaaaagaagcacacagtatacattcaggctgactgcttctaatacggaaggaaaaagctgtccaagcgaagttcttgtttgtacgacgagtcctgacaggcctggacctcctaccagaccgcttgtcaaaggcccagttacatctcatggctttagtgtcaaatgggatccccctaaggacaatggtggttcagaaatcctcaagtacttgctagagattactgatggaaattctgaagcgaatcagtgggaagtggcctacagtgggtcggctaccgaatacaccttcacccacttgaaaccaggcactttgtacaaactccgagcatgctgcatcagtaccggcggacacagccagtgttctgaaagtctccctgttcgcacactaagcattgcaccaggtcaatgtcgaccaccgagggttttgggtagaccaaagcacaaagaagtccacttagagtgggatgttcctgcatcggaaagtggctgtgaggtctcagagtacagcgtggagatgacggagcccgaagacgtagcctcggaagtgtaccatggcccagagctggagtgcaccgtcggcaacctgcttcctggaaccgtgtatcgcttccgggtgagggctctgaatgatggagggtatggtccctattctgatgtctcagaaattaccactgctgcagggcctcctggacaatgcaaagcaccttgtatttcttgtacacctgatggatgtgtcttagtgggttgggagagtcctgatagttctggtgctgacatctcagagtacaggttggaatggggagaagatgaagaatccttagaactcatttatcatgggacagacacccgttttgaaataagagacctgttgcctgctgcacagtattgctgtagactacaggccttcaatcaagcaggggcagggccgtacagtgaacttgtcctttgccagacgccagcgtctgcccctgaccccgtctccactctctgtgtcctggaggaggagccccttgatgcctaccctgattcaccttctgcgtgccttgtactgaactgggaagagccgtgcaataacggatctgaaatccttgcttacaccattgatctaggagacactagcattaccgtgggcaacaccaccatgcatgttatgaaagatctccttccagaaaccacctaccggatcagaattcaggctataaatgaaattggagctggaccatttagtcagttcattaaagcaaaaactcggccattaccacccttgcctcctaggctagaatgtgctgctgctggtcctcagagcctgaagctaaaatggggagacagtaactccaagacacatgctgctgaggacattgtgtacacactacagctggaggacagaaacaagaggtttatttcaatctacagaggacccagccacacctacaaggtccagagactgacggaattcacatgctactccttcagaatccaggcagcaagcgaggctggagaagggcccttctcagaaacctataccttcagcacaaccaaaagtgtcccccccaccatcaaagcacctcgagtaacacagttagaaggaaattcatgtgaaattttatgggagacggtaccatcaatgaaaggtgaccctgttaactacattctgcaggtattggttggaagagaatctgagtacaaacaggtgtacaagggagaagaagccacattccaaatctcaggcctccagaccaacacagactacaggttccgcgtatgtgcgtgtcgtcgctgtttagacacctctcaggagctaagcggagccttcagcccctctgcggcttttgtattacaacgaagtgaggtcatgcttacaggggacatggggagcttagatgatcccaaaatgaagagcatgatgcctactgatgaacagtttgcagccatcattgtgcttggctttgcaactttgtccattttatttgcctttatattacagtacttcttaatgaagtaaacccaacaaaactagaggtatgaattaatgctacacattttaatacacacatttattcagatactcccctttttaaagcccttttgttttttgatttatatactctgttttacagatttagctagaaaaaaaatgtcagtgttttggtgcacctttttgaaatgcaaaactaggaaaaggttaaactggatttttttttttaaaaaaaagaaaaaaaaagaagaaaagtataccagataccaaaagctagctttcttatgttttcctttaaattttcagatttaccttcattctgttttcactgatgtcttttgcaagcctttgatttttttttttttgttacagtttagtaatttatattcaccagtcacttcatatgtcttgaacatctgtatctgtaaacatgaatcaccgtgtgtgtacttacagggctaggatttcagtgttgtcagagtattaccacacagcaacagcaacatacagaagatatgttcactcagataagactgccctaaacaaccattttgtcactcagttatttaactgtgtttagctcatttaaatcaaaatgtgtactttaatctaaaatgttttaataatctgtatttcttataattttaacactatgagctgcctgtataagaaatcaagtaaccagaatgcacctataaattatggagcattgtagattttaccacatcaattcatagcagtaactttaagagggcattgtgcaatagttagttgttttcttgttcagctattttaaaggctgctttaacttgtttgtttgtctttgtatataactacttctaatctaatcactagagttattatattctgttatgtttgaccagaattatatgacaagaactggtgacagtttagtgcctctgcccattgtccatgatttacactaattgtgagcagtcttcttatgtgtcagctcattatttttgaaacatttgcctttaggctgttctttgaggtatcaatgaagtgattgaatttcaataccttaattcagtgcacataatactaatgtaacagcagatgaaaattgataaaacccaaaagagagtcatctaaatttgtagttcctatttctgtgggtttgcctggccatggttggagagggaatggtgtttgatggtaaacacagggtgtttggggatcaaggagcctagattctctccctggatctgtcactaacttgctgcgtgacctgaacacgtcactttacctctctgtgcctcagttttcccatgcatgaaaaataaaataaaataaaacggggattctaatgtttgtaagtgctttgagatctttgaccaacaggtgctattggagtgcaaagtgttactcttacgtgtttattttgagtcatgagataatcaattttaacccaaagtcattggattatttatatgaagtccataatgttcgagtacctcagggacatttaagagttggaggtgcaaatatattccaaaagggtgcaacagacacagtgtatccccctgcttctgtttttgtatatttttgctacttggtttttcttgatcatagctattttgtgcttgatctttattgtctaagatgcagtatcctgtactagcttataatattcccataccaaagtcatggggaaacaaacattattttgtttttggtttatttatactatattctgcatacagtactttaaatgccaattacagtgcaatctttatttattgtaaaattttttaagtgtacttatgtactaattttcccttgtagcatgttatatttttgtgttttatacttttgtaattttaggtcagtcttgttccttggcaacatctgtagtattattaatcttctgacattttcttatgtttttaaaaagataagagcatctagtgcattaaatgccaaaaaaaaaatacattatcagtgattgaaacgtttacatgtacccaaaaaccataatcatctcttggaagaaaatgctgagatcaatgaattattctgtgtgcctatattgacgtagtgagtactagagagttctgtattttattattgactataataattagtttaattagctttgcaaactgatggcatcaaggtaaatatatttttgccaaagttctggccttccaaaactcacccccttatttaaatgtgtgctatgacccactatgaccacagcatctgcattttctaaaaaattccatgcaggtgttttggggagaggtattttttaagcaatgaaaattcaactgagtacaaagccccctcttggggggttggggaagtctcttttttgaaacacttcagaactgctgctataaagaaattctctaattggttgaattttttttttaagtaaatagtactttaggccaaaatttatatgaatatttgatcttcttgagattttcatactatcatttaaccaccaggaagctgaagtgtgtgaagtacaaagctgacagcactttattttattgctctccattatttggtattcattatattccttcagtcagaaaattattactctctatggcactgttttttatcacaaatatgtatatgtgatattgatatataactatatatattgccatcacacacgaacaataaaataaagtgttctattaacctgatctctttgcccttttgctatgtgaggagtgaatgagtggccttctgatgctctgactcttctctgtatgtcaaactcatccctggcacaagaaattccagtcatgtgaagcaaactgccctttgtcctcaaagaaattgttgaaaaagaaaactttttaaagagattttttgcatattctctgccttgttcttatcaacttgaaatgttggcattttctaaccttgttttgttggctacaataattcagtattcatgtcaaaattgagaagtgccctaattgaatgtgtttgaatgttatccttgcacaattctttaaattgaaagataaaatgttttacctcactgttggacatacattccaagcttttcaactctaggagaaaaagaaaatcatgttttcctgtattgtaaattttagactatttcatatacattgtattaaaactgccatatcaattttaatgtatagattttgcaaatattatgctatatgtaatacctaactgtatctgtagtgtatatgtaatatatttatgcccaataaatgttttaattctttctga

SEQ ID NO: 22635 - DNA, 9166 bp, Homo Sapiens
atggctttggtcacggtccagcggtcacctacccccagcaccacctccagcccctgcgcctcggaggcagacagtggggaggaagaatgccggtcacagcccaggagcatcagcgagagctttctaactgtcaaaggtgctgccctttttctaccacggggaaatggctcatccacaccaagaatcagccacagacggaacaagcatgcaggcgatctccaacagcatctccaagcaatgttcattttactccgcccagaagacaacatcagactggctgtaagactggaaagtacttaccagaatcgaacacgctatatggtagtggtttcaactaatggtagacaagacactgaagaaagcatcgtcctaggaatggatttctcctctaatgacagtagcacttgtaccatgggcttagttttgcctctctggagcgacacgctaattcatttggatggtgatggtgggttcagtgtatcgacggataacagagttcacatattcaaacctgtatctgtgcaggcaatgtggtctgcactacagagcttacacaaggcttgtgaagtcgccagagcgcataactactacccaggcagcctatttctcacttgggtgagttattatgagagccatatcaactcagatcaatcctcagtcaatgaatggaatgcaatgcaagatgtacagtcccaccggcccgactctccagctctcttcaccgacatacctactgaacgtgaacgaacagaaaggctaattaaaaccaaattaagggagatcatgatgcagaaggatttggagaatattacatccaaagagataagaacagagttggaaatgcaaatggtgtgcaacttgcgggaattcaaggaatttatagacaatgaaatgatagtgatccttggtcaaatggatagccctacacagatatttgagcatgtgttcctgggctcagaatggaatgcctccaacttagaggacttacagaaccgaggggtacggtatatcttgaatgtcactcgagagatagataacttcttcccaggagtctttgagtatcataacattcgggtatatgatgaagaggcaacggatctcctggcgtactggaatgacacttacaaattcatctctaaagcaaagaaacatggatctaaatgccttgtgcactgcaaaatgggggtgagtcgctcagcctccaccgtgattgcctatgcaatgaaggaatatggctggaatctggaccgagcctatgactatgtgaaagaaagacgaacggtaaccaagcccaacccaagcttcatgagacaactggaagagtatcaggggatcttgctggcaagcaaacagcggcataacaaactatggagatctcattcagatagtgacctctcagaccaccacgaacccatctgcaaacctgggctagaactcaacaagaaggatatcaccacctcagcagaccagattgctgaggtgaagaccatggagagtcacccacccatacctcctgtctttgtggaacatatggtcccacaagatgcaaatcagaaaggcctgtgtaccaaagaaagaatgatctgcttggagtttacttctagggaatttcatgctggacagattgaggatgaattaaacttaaatgacatcaatggatgctcatcagggtgttgtctgaatgaatcaaaatttcctcttgacaattgccatgcatccaaagccttaattcagcctggacatgtcccagaaatggccaacaagtttccagacttaacagtggaagatttggagacagatgcactgaaagcagacatgaatgtccacctactgcctatggaagaattgacatctccactgaaagacccccccatgtcccctgatcctgagtcaccaagcccccaacccagttgccagactgaaatctcagatttcagtacagatcgcattgacttttttagtgccctagagaagtttgtggagctctcccaagaaacccggtcacgatctttttcccattcaaggatggaggaactgggtggaggaaggaatgagagctgtcgactgtcagtggtagaagtagccccttccaaagtgacagctgatgaccagagaagcagctctttgagtaatactccccatgcatcagaagaatcttcaatggatgaggaacagtcaaaggcaatttcagaactggtcagcccagacatcttcatgcagtctcactcggaaaatgcaatttcagtcaaagaaattgtcactgaaattgagtccatcagtcaaggagttgggcagattcaactgaaaggagacatcttacccaacccatgccatacaccaaagaagaacagcatccatgagctgctccttgagagggcccagactccagagaacaaacctggacatatggagcaagatgaggactcctgcacagcccagcctgaactagccaaagactcagggatgtgcaacccagaaggctgcctaaccacacactcatctatagcagacttggaagaaggggaaccagctgagggggaacaagagctccagggctcagggatgcacccaggtgccaagtggtaccctgggtctgtgaggcgagccaccttggagttcgaagagcgcttacggcaggagcaagagcatcatggtgctgccccaacatgtacctcattgtccactcgtaagaattcaaagaatgattcttctgtggcagacctagcaccaaaagggaaaagtgatgaagcccccccagaacattcatttgtcctcaaggaaccagaaatgagcaaaggcaaagggaaatacagtgggtctgaggctggctcactgtcccattctgagcagaatgccactgttccagctcccagggtgctggagtttgaccacttgccagatcctcaggagggcccagggtcagatactggaacacagcaggaaggagtcctgaaggatctgaggactgtgattccataccaggagtctgaaacacaagcagtccctcttccccttcccaagagggtagaaatcattgaatatacccacatagttacatcacccaatcacactgggccagggagtgaaatagccaccagtgagaagagcggagagcaagggctgaggaaagtgaacatggaaaaatctgtcactgtgctctgcacactggatgaaaatctaaacaggactctggaccccaaccaggtttctctgcacccccaagtgctacctctgcctcattcttcctcccctgagcacaacagacccactgaccatccaacctccatcctgagtagccctgaagacagaggcagcagcctgtccacagccctggagacagcagcaccttttgtcagtcatacaacccatttactgtctgccagtttggattacctgcatccccagactatggttcacctggagggcttcacagagcagagcagcactacagatgagccctctgcagaacaggttagctgggaagaaagtcaggagagccctctctccagtggcagtgaggtgccatataaggactcccagctaagtagcgcagacctaagtttaattagcaaacttggtgacaacactggggagttacaggagaaaatggacccattgcctgtagcctgtcgactcccacatagctctagtagtgaaaacataaagagtctcagccacagccccggtgtggtgaaggagcgtgctaaagaaatcgagtctcgagtggttttccaggcagggctcaccaaaccatcccaaatgaggcgctcagcttctctcgccaaattaggttacttggacctctgtaaagactgcttaccagagagggagcctgcctcctgtgaatcccctcatctcaaactgcttcagcctttcctcagaacagactcaggcatgcacgcgatggaggaccaagagtccctagaaaacccaggtgccccccacaacccagagcccaccaagtcttttgtagaacaactcacaacaacagagtgtattgtgcagagcaagccagtggagaggccccttgtgcagtatgccaaagaatttggttctagtcagcagtatttgctccccagggcaggacttgaattgactagttctgaaggaggccttcccgtgctacagacccagggactgcagtgtgcatgcccagctccagggctggccgtggcaccccgtcagcaacacggcagaactcacccccttaggagactgaaaaaggcaaatgacaaaaaacggacaaccaaccccttctataataccatgtgattctgagcctacacatgtgactttctagaagaaatgtttgtaaaaggggcaggtgtaatatgtaaggaacatgcactttattggttaattttataatattttggtcattttactgtttctggtgcatgcagggtttgggtgtttttcagtgtgtatgtgtgtgtatatgtaaggggaaagagagattgatctggatggcaagaccgtttatcattttttatttaaaaaaatcaaacctcaaaaaagtcattttcagagaacacctttatcaaaggcaaattgctgtttttcagtcagctgccacctgcttctcattttgccctctgagaaaaggcatggtttcttaattgagggaaggaagcagattcggaggggtggagataaagctggggattggagatgttcccctgcctttgtgatgatggtttggtttccagacctgaggcatcgaatgggctaaaggtcagccagaagtcagagggctctcagccttcatccagccgcagccctttagagttcctgaaggaggcaggttccgctttgctttaaaagagggtcttccggtgttccagagtgtatcgttacagtaagacatgataatggccggctctgcaaatttatcatatagtttttttcccaagaaaattatttttgaaattaaaacaggaccccaaatgaaatccaagtggtcttctgtagaggaaagcatgataagaggaggaagacataaagttgggggtggagaggctgctgcccagaaactgctgggttggtgggatccacacagatgggcatcttggctctccctgccagaaaaatgtgctctgcagtgtcctcccaactgaaaacaacagtgacatgtttgaaaagcagcaatcgaaagtcagtgtgttcttgtaaaatgaatatgtatgtagggttttaacccttccattacttgaataattctttgggccttctgagtttaatggccatattttcttccagtttattttccttccccatgctgttgtccccatgctgcctatttttttaaatttcatagattatatttgaattgttacatatgtttaacatccattgaatgcaacgttttatttttggtattatcactgttaacacttttttttccttttcctggaaggtttgtcatttctctaaagtttgtacacagtatttatgtacataatattgtcactgtcttagtgtcttgttcatgttgtagggtaattttgatttattctttttaagaaggagtagagttgcaactggaaaacacagacaccagaaatgaaagtgttgggtgttgataggaatctgtacaatatgttgatggtggctgtagttgtttaaatggagacttccaatcaccagctcctgccaaattatgcattagtaactttttcctcagagacacccctaaaggctcccattaggtcacagcgtgactgaaagctgatttctctgtgagactgaaatcccagaacattgtttgccagtatctcaaccacagccaggaagtatatgtgagttgcccagagtggaagctcctagtagaggctgaaggccacaggggaggcctcagccaggggcaagtgcccacagtgactccatttaggatgctgtcgttttgctactgttgtggagatccttaacgcagcagcgcctgtcataaacaagcctcttgtagcttcttacagaaaacagatttagtctagcatgaaacacctctgcatctcattgaaactgaagaggcttgcagatttgctttcgttgatgtccacgttactgaggattgactgagtatagactggagacaggtttttggcttatcacagcactgaggaaaatacaaatgcacagactgtcagcatgatgtcagaggccagagtttggtgggggcagatggcagggcgacccaaaagatgcagaaaaggtagactggggccactgggtcttaagaggagctgtgaagttgtgtggaagccaaggctgggtctgacatccctgccaggaagcaggttggacagaaaccacttgctaaaagcgtctctatggtgcagtgattatgtgtaccctgtgctgttgctcagtagtctccttgaatgttcaagtatctcatccactcagttttgtgattcctggatatttgtgtgttgtaaagtgttttgttaggtggtatgaaccaatgtgaggaggcttgagacagggttatggatttccagagctcttccatgtagaataccctgccttcttgaagcagttccaccaccaatatgatggggaagggcaggaacttatggcagggtggggagagggtttgcctggaagttaagagagtggcatccacttgtggtaaccccttacgatgatgacatcccacacactaagaggtacaagcaggaccaaagttttggactgttccctcttctcccctccactgtgtttaatgttcactcactgcattaaataacaacaaagatgggacaaaacccactaatactgtggggaaaaaaaattttcaagagcagaggaaagtctttctgcctttttataattactttttttatcatttaatttacctgcctaaataaacatcttctacagaatatctgtcattcaaccatgccaaggagtttgtgccagccttttcagactcccagaattgggtgttcctgggttatttacatagctgagcagtgtccaggggaggtgcgcagtgaactgtcaaggactttccagactgtcttctcttcagacttttataatctccagtggcatctttcccttttcttttgttcatgacctgacctgaagcagcagatttgatagactggcaaagatgaataggaaaaactttgactcttgcccagtgcctgcctgcctctctctctctcctctctctctctctctttttaaaccaccatagactctcacttattttggaggagtgtatgtgcatgtgtacacatatgtacatatataaaaacagttgatgttttggtgtatggggtaaaagccccaggagcatacagaacttgagctgaacctggtcagtagaaagggaaaccccaaccctttcttgatttttggagacacccaggactaatggatactgtagtagacatgtagtactatagtaccgtaatattcatctctcctcattttagttgcctttcagattctaaatgtttgggatcattcctatcatcttagtctcttcaggatctttagtattttcctggttctgaggaggcttgagacagggttatggatttccttgttctgtgtctttatccctactgatagttcctctttctcattttgcaaactacccagagctccaaggacagcctgaagatctcagtgcctcaggctctgaggtactctgctcacaggccccagacagatgctgttgggtaaactcaaagcttcctatgagaagcttctgagatgtagcaggtcacagaagtgttcacctgtttcatctgaggatttcagttctgaagtgatctaggcatgtttggtaaaaatgtttttgtgagagttctttttttaagaaagcattatgcaaaaagtcacttttaagggcatttaaaaatttttaagtaaagccattctttggcttttttggactatttgtggatactttgtttacattttgaatattaaaatgtgcatcatcttgtcggccatgcagtcctgcaggcatcagtgccctggctgtcctgtgagtcctcatgcagagcagggccatcatggtcagcccttgtgagtaagtgggtatacgctgaagctgacttccgtctgtgtcctgccctcccatccagcactctctatggaaatagttgtcatttcctcagtgatggtgtgtcttatagtgatggttgtaatggtgaatggctagtgtcattttgtttaattttgttttgctttttgatggtggataagatgaaattttagctgtttcagcatcaatccaacttaaaagcatcttggactttgttttcccttccaaactaaaagatcaaggcatgtattagacacaagcatatttgctgcctcaactcctctgacacccatattaggaaaaggcctgccaccaaagcaggaagctgcacactcctaacccttctcccagggtgtggggtcccttgacgtcatgaagagctattgcaaggtgcttctgtacttttccagcctggaaatggagggtgactggccctggctcctgctatgagaagataaccagcctcattttctcagtgccccagaggtctaggataggatttctaaactggaatcatccttaatcaccttgaagatcccttaagaggcatttgactggtgctgccgtctgtgtcctcaaagcaatgctggtggcagcgtcctgtgtacacatgcagagctaatacccaaactaaaaactgggtaactggccctgaagtgcttcccaatcagtaagcccacagggaaatgtttgatttttatgttctgttggattttggtttgcttggcatatctaaaggtgcctttacttttctttttttttttttttctttctgctttgttttgtaggacttgttctaacatggaaaacaagtccagaagactctcctctgactgttacctttgccccaagccaccccaaacttttatgctcatgttttattaaagcaggtgctccctggaatctctgggacatttttgaggcatttgaagcagaatatagagtggtctcatctccttccttaatcttcctggtggttgggatgttccacttgtatcatagatttttttattacagatatgctccactgtttttaaatgtgaacttgtgcgcaaatgtgcagattcaatgttcttgttacagattgaataaatttttattttg

SEQ ID NO: 22636 - DNA, 2136 bp, Homo Sapiens
atggaaagcggtgcagttctgctggaatccaaatcctccccatttaacctactgcatgagatgcatgagcttcgcctcctgggtcacctgtgtgacgtgacagtcagcgtggagtatcagggtgtccgcaaagacttcatggcccacaaggcagtgctggctgccaccagcaagttttttaaggaagtgttccttaatgagaagagtgtggatggtactaggactaatgtctacttaaatgaagtgcaggttgctgactttgcttcatttcttgagtttgtctacactgcaaaggtacaggtggaagaagatcgggtgcagcgaatgctggaagtggctgaaaagctgaaatgtttggatttatcagaaacttgttttcaattaaagaaacagatgttagagtcagtacttttggagttgcaaaatttctcagagtctcaggaggtggaggtgagcagtggctcccaagttagtgctgctcctgcccccagggcaagtgtggccaccgatggccctcaccccagtggtctcacggattccttggactacccaggagagagagccagcaatggcatgtcttcagatttgccaccgaagaagtccaaggacaaactagacaagaagaaagaggtagttaaacctccctaccctaaaatcaggagagctagtggaaggctggctgggaggaaggtctttgtggagatccctaaaaagaaatatacgagaagactccgagagcagcagaaaactgctgagggtgatgtgggggactacaggtgtccccaggaccaaagcccggacagggtgggcacggagatggagcaggtttccaaaaatgagggttgccaggcaggtgctgagttggaggaattgtcaaagaaagcagggccggaggaggaagaggaggaggaggaggaggacgaagaaggggagaagaagaagagcaactttaagtgcagcatttgcgagaaggcgtttctgtatgagaagagcttcctgaagcacagcaagcaccgccacggcgtggccaccgaggtggtgtaccgctgcgacacctgcggccagaccttcgccaaccgctgcaacctgaagagccaccagcgccacgtgcacagcagcgagcgccatttcccatgcgagctgtgcgggaagaagttcaagcgcaagaaggacgtgaagcggcacgtgctgcaggtgcatgagggcggcggcgagcggcaccgctgcggccagtgcggcaagggcctgagttccaagacagcgctgcggctgcacgagcgcacacacacgggagaccggccctacggctgcaccgagtgcggcgccaggttctcgcagccgtccgcgctcaagacgcacatgagaattcatacaggggaaaaaccttttgtctgtgatgaatgtggtgcaagattcactcagaaccacatgctgatttatcataaaaggtgtcacacaggtgaaagaccttttatgtgtgaaacatgtggcaagagttttgcttctaaggagtacttaaaacaccacaatagaatccatactggatccaaaccctttaaatgtgaagtatgtttcaggacttttgcccagcggaattcactgtaccagcatattaaagtccacacaggggagcgtccctactgctgtgaccagtgcggcaagcagttcacccagctcaacgccctccagcgccaccgccgcatccacacaggggagaggccattcatgtgcaatgcgtgcggacggacattcaccgacaagtccactcttcggcggcacacctcaatacacgataagaatactccatggaagtctttccttgtcattgtagatggctcgcccaagaacgatgacggacacaagactgaacagcctgacgaagagtatgtgtcatccaagctttcggataaattgctgtcttttgcagaaaatggccatttccacaacctggctgcagtccaagacactgtacctaccatgcaggagaacagttctgctgacacagcctgcaaggcagatgactccgtggtgtcccaggacaccctcctggccaccaccatcagtgagcttagcgagctgaccccacagacagactcgatgcccacacagcttcactctttgagcaacatggaataa

SEQ ID NO: 22637 - DNA, 7479 bp, Homo Sapiens
atgaccgctgagcccatgagtgaaagcaagttgaatacattggtgcagaagcttcatgacttccttgcacactcatcagaagaatctgaagaaacaagttctcctccacgacttgcaatgaatcaaaacacagataaaatcagtggttctggaagtaactctgatatgatggaaaacagcaaggaagagggaactagctcttcagaaaaatccaagtcttcaggatcgtcacgatcaaagaggaaaccttcaattgtaacaaagtatgtagaatcagatgatgaaaaacctttggatgatgaaactgtaaatgaagatgcgtctaatgaaaattcagaaaatgatattactatgcagagcttgccaaaaggtacagtgattgtacagccagagccagtgctgaatgaagacaaagatgattttaaagggcctgaatttagaagcagaagtaaaatgaaaactgaaaatctcaaaaaacgcggagaagatgggcttcatgggattgtgagctgcactgcttgtggacaacaggtcaatcattttcaaaaagattccatttatagacacccttcattgcaagttcttatttgtaagaattgctttaagtattacatgagtgatgatattagccgtgactcagatggaatggatgaacaatgtaggtggtgtgcggaaggtggaaacttgatttgttgtgacttttgccataatgctttctgcaagaaatgcattctacgcaaccttggtcgaaaggagttgtccacaataatggatgaaaacaaccaatggtattgctacatttgtcacccagagcctttgttggacttggtcactgcatgtaacagcgtatttgagaatttagaacagttgttgcagcaaaataagaagaagataaaagttgacagtgaaaagagtaataaagtatatgaacatacatccagattttctccaaagaagactagttcaaattgtaatggagaagaaaagaaattagatgattcctgttctggctctgtaacctactcttattccgcactaattgtgcccaaagagatgattaagaaggcaaaaaaactgattgagaccacagccaacatgaactccagttatgttaaatttttaaagcaggcaacagataattcagaaatcagttctgctacaaaattacgtcagcttaaggcttttaagtctgtgttggctgatattaagaaggctcatcttgcattggaagaagacttaaattccgagtttcgagcgatggatgctgtaaacaaagagaaaaataccaaagagcataaagtcatagatgctaagtttgaaacaaaagcacgaaaaggagaaaaaccttgtgctttggaaaagaaggatatttcaaagtcagaagctaaactttcaagaaaacaggtagatagtgagcacatgcatcagaatgttccaacagaggaacaaagaacaaataaaagtaccggtggtgaacataagaaatctgatagaaaagaagaacctcaatatgaacctgccaacacttctgaagatttagacatggatattgtgtctgttccttcctcagttccagaagacatttttgagaatcttgagactgctatggaagttcagagttcagttgatcatcaaggggatggcagcagtggaactgaacaagaagtggagagttcatctgtaaaattaaatatttcttcaaaagacaacagaggaggtattaaatcaaaaactacagctaaagtaacaaaagaattatatgttaaactcactcctgtttccctttctaattccccaattaaaggtgctgattgtcaggaagttccacaagataaagatggctataaaagttgtggtctgaaccccaagttagagaaatgtggacttggacaggaaaacagtgataatgagcatttggttgaaaatgaagtttcattacttttagaggaatctgatcttcgaagatccccacgtgtaaagactacacccttgaggcgaccgacagaaactaaccctgtaacatctaattcagatgaagaatgtaatgaaacagttaaggagaaacaaaaactatcagttccagtgagaaaaaaggataagcgtaattcttctgacagtgctatagataatcctaagcctaataaattgccaaaatctaagcaatcagagactgtggatcaaaattcagattctgatgaaatgctagcaatcctcaaagaggtgagcaggatgagtcacagttcttcttcagatactgatattaatgaaattcatacaaaccataagactttgtatgatttaaagactcaggcggggaaagatgataaaggaaaaaggaaacgaaaaagttctacatctggctcagattttgatactaaaaagggcaaatcagctaagagctctataatttctaaaaagaaacgacaaacccagtctgagtcttctaattatgactcagaattagaaaaagagataaagagcatgagtaaaattggtgctgccagaaccaccaaaaaaagaattccaaatacaaaagattttgactcttctgaagatgagaaacacagcaaaaaaggaatggataatcaagggcacaaaaatttgaagacctcacaagaaggatcatctgatgatgctgaaagaaaacaagagagagagactttctcttcagcagaaggcacagttgataaagacacgaccatcatggaattaagagatcgacttcctaagaagcagcaagcaagtgcttccactgatggtgtcgataagctttctgggaaagaggagagttttacttctttggaagttagaaaagttgctgaaactaaagaaaagagcaagcatctcaaaaccaaaacatgtaaaaaagtacaggatggcttatctgatattgcagagaaattcctaaagaaagaccagagcgatgaaacttctgaagatgataaaaagcagagcaaaaagggaactgaagaaaaaaagaaaccttcagactttaagaaaaaagtaattaaaatggaacaacagtatgaatcttcatctgatggcactgaaaagttacctgagcgagaagaaatttgtcattttcctaagggcataaaacaaattaagaatggaacaactgatggagaaaagaaaagtaaaaaaataagagataaaacttctaaaaagaaggatgaattatctgattatgctgagaagtcaacagggaaaggagatagttgtgactcttcagaggataaaaagagtaagaatggagcatatggtagagagaagaaaaggtgcaagttgcttggaaagagttcaaggaagagacaagattgttcatcatctgatactgagaaatattccatgaaagaagatggttgtaactcttctgataagagactgaaaagaatagaattgagggaaagaagaaatttaagttcaaagagaaatactaaggaaatacaaagtggctcatcatcatctgatgctgaggaaagttctgaagataataaaaagaagaagcaaagaacttcatctaaaaagaaggcagtcattgtcaaggagaaaaagagaaactccctaagaacaagcactaaaaggaagcaagctgacattacatcctcatcttcttctgatatagaagatgatgatcagaattctataggtgagggaagcagcgatgaacagaaaattaagcctgtgactgaaaatttagtgctgtcttcacatactggattttgccaatcttcaggagatgaagccttatctaaatcagtgcctgtcacagtggatgatgatgatgacgacaatgatcctgagaatagaattgccaagaagatgcttttagaagaaattaaagccaatctttcctctgatgaggatggatcttcagatgatgagccagaagaagggaaaaaaagaactggaaaacaaaatgaagaaaacccaggagatgaggaagcaaaaaatcaagtcaattctgaatcagattcagattctgaagaatctaagaagccaagatacagacataggcttttgcggcacaaattgactgtgagtgacggagaatctggagaagaaaaaaagacaaagcctaaagagcataaagaagtcaaaggcagaaacagaagaaaggtgagcagtgaagattcagaagattctgattttcaggaatcaggagttagtgaagaagttagtgaatccgaagatgaacagcggcccagaacaaggtctgcaaagaaagcagagttggaagaaaatcagcggagctataaacagaaaaagaaaaggcgacgtattaaggttcaagaagattcatccagtgaaaacaagagtaattctgaggaagaagaggaggaaaaagaagaggaggaggaagaggaggaggaggaggaagaggaggaggaagatgaaaatgatgattccaagtctcctggaaaaggcagaaagaaaattcggaagattcttaaagatgataaactgagaacagaaacacaaaatgctcttaaggaagaggaagagagacgaaaacgtattgctgagagggagcgtgagcgagaaaaattgagagaggtgatagaaattgaagatgcttcacccaccaagtgtccaataacaaccaagttggttttagatgaagatgaagaaaccaaagaacctttagtgcaggttcatagaaatatggttatcaaattgaaaccccatcaagtagatggtgttcagtttatgtgggattgctgctgtgagtctgtgaaaaaaacaaagaaatctccaggttcaggatgcattcttgcccactgtatgggccttggtaagactttacaggtggtaagttttcttcatacagttcttttgtgtgacaaactggatttcagcacggcgttagtggtttgtcctcttaatactgctttgaattggatgaatgaatttgagaagtggcaagagggattaaaagatgatgagaagcttgaggtttctgaattagcaactgtgaaacgtcctcaggagagaagctacatgctgcagaggtggcaagaagatggtggtgttatgatcataggctatgagatgtatagaaatcttgctcaaggaaggaatgtgaagagtcggaaacttaaagaaatatttaacaaagctttggttgatccaggccctgattttgttgtttgtgatgaaggccatattctaaaaaatgaagcatctgctgtttctaaagctatgaattctatacgatcaaggaggaggattattttaacaggaacaccacttcaaaataacctaattgagtatcattgtatggttaattttatcaaggaaaatttacttggatccattaaggagttcaggaatagatttataaatccaattcaaaatggtcagtgtgcagattctaccatggtagatgtcagagtgatgaaaaaacgtgctcacattctctatgagatgttagctggatgtgttcagaggaaagattatacagcattaacaaaattcttgcctccaaaacacgaatatgtgttagctgtgagaatgacttctattcagtgcaagctctatcagtactacttagatcacttaacaggtgtgggcaataatagtgaaggtggaagaggaaaggcaggtgcaaagcttttccaagattttcagatgttaagtagaatatggactcatccttggtgtttgcagctagactacattagcaaagaaaataagggttattttgatgaagacagtatggatgaatttatagcctcagattctgatgaaacctccatgagtttaagctccgatgattatacaaaaaagaagaaaaaagggaaaaaggggaaaaaagatagtagctcaagtggaagtggcagtgacaatgatgttgaagtgattaaggtctggaattcaagatctcggggaggtggtgaaggaaatgtggatgaaacaggaaacaatccttctgtttctttaaaactggaagaaagtaaagctacttcttcttctaatccaagcagcccagctccagactggtacaaagattttgttacagatgctgatgctgaggttttagagcattctgggaaaatggtacttctctttgaaattcttcgaatggcagaggaaattggggataaagtccttgttttcagccagtccctcatatctctggacttgattgaagattttcttgaattagctagtagggagaagacagaagataaagataaaccccttatttataaaggtgaggggaagtggcttcgaaacattgactattaccgtttagatggttccactactgcacagtcaaggaagaagtgggctgaagaatttaatgatgaaactaatgtgagaggacgattatttatcatttctactaaagcaggatctctaggaattaatctggtagctgctaatcgagtaattatattcgacgcttcttggaatccatcttatgacatccagagtatattcagagtttatcgctttggacaaactaagcctgtttatgtatataggttcttagctcagggaaccatggaagataagatttatgatcggcaagtaactaagcagtcactgtcttttcgagttgttgatcagcagcaggtggagcgtcattttactatgaatgagcttactgaactttatacttttgagccagacttattagatgaccctaattcagaaaagaagaagaagagggatactcccatgctgccaaaggataccatacttgcagagctccttcagatacataaagaacacattgtaggataccatgaacatgattctcttttggaccacaaagaagaagaagagttgactgaagaagaaagaaaagcagcttgggctgagtatgaagcagagaagaagggactgaccatgcgtttcaacataccaactgggaccaatttaccccctgtcagtttcaactctcaaactccttatattcctttcaatttgggagccctgtcagcaatgagtaatcaacagctggaggacctcattaatcaaggaagagaaaaagttgtagaagcaacaaacagtgtgacagcagtgaggattcaacctcttgaggatataatttcagctgtatggaaggagaacatgaatctctcagaggcccaagtacaggcgttagcattaagtagacaagccagccaggagcttgatgttaaacgaagagaagcaatctacaatgatgtattgacaaaacaacagatgttaatcagctgtgttcagcgaatacttatgaacagaaggctccagcagcagtacaatcagcagcaacagcaacaaatgacttatcaacaagcaacactgggtcacctcatgatgccaaagcccccaaatttgatcatgaatccttctaactaccagcagattgatatgagaggaatgtatcagccagtggctggtggtatgcagccaccaccattacagcgtgcaccacccccaatgagaagcaaaaatccaggaccttcccaagggaaatcaatgtga

SEQ ID NO: 22638 - DNA, 3819 bp, Homo Sapiens
atggatctattcgactttttcagagactgggacttggagcagcagtgtcactatgaacaagaccgtagtgcacttaaaaaaagggaatgggagcggaggaatcaagaagtccagcaagaagacgatctcttttcttcaggctttgatctttttggggagccatacaagacaaacaaaggtgatgcacttgccaaccgagtccagaacacgcttggaaactatgatgaaatgaagaatttgctaactaaccattctaatcagaatcacctagtgggaattccaaagaattctgtgccccagaatcccaacaacaaaaatgaaccaagcttttttccagaacaaaagaacagaataattccacctcaccaggataatacccatccttcagcaccaatgcctccaccttctgttgtgatactgaattcaactctaatacacagcaacagaaaatcaaaacctgagtggtcacgtgatagtcataaccctagcactgtactggcaagccaggccagtggtcagccaaacaagatgcagactttgacacaggaccagtctcaagccaaactggaagacttctttgtctacccagctgaacagccccagattggagaagttgaagagtcaaacccatctgcaaaggaagacagtaaccctaattctagtggagaagatgctttcaaagaaatctttcaatccaattcaccggaagaatctgaattcgccgtgcaagcgcctgggtctcccctagtggcttcctctttattagctcctagcagtggcctttcagttcaaaacttcccaccagggctttactgcaaaacaagcatggggcagcaaaagccaactgcatacgtcagacccatggatggccaggaccaggcaccggacatctcaccaacactgaaaccttcaattgaatttgagaacagctttgggaatctgtcatttggaacactcttggatggaaaacccagtgcagccagttcaaagactaaactgccaaagttcaccatcctccaaacaagtgaagtaagccttcccagtgatccaagctgtgttgaagaaatcttgcgggaatcgcagcatctgaccccaggattcaccttacaaaagtggaatgacccaaccaccagagcttctacaaagatgcttgaggatgacctgaagctgagcagtgatgaagatgaccttgagcctgtgaagaccttgaccactcagtgcactgccactgagctctaccaggctgttgaaaaggcaaaacctaggaataatcctgtgaacccacccttggccactccccagcccccacctgcagtgcaagccagcgggggttctggcagctccagcgaatcggagagcagctctgagtcggattcagacactgaaagtagcaccactgacagcgaatctaatgaggcacctcgtgtggcaactccagagcctgagccaccctcaaccaacaagtggcaactggataaatggcttaacaaagtgacatcccagaacaagtcttttatttgtggccaaaatgaaacacccatggagactatttctctgcctcctccaatcatccaaccaatggaagtccagatgaaagtgaagacgaatgccagtcaggtcccagctgaacccaaagaaaggcctctcctcagtctcattagggagaaagcccgtccacggcccactcagaaaattccagaaacaaaggctttgaagcataagttgtcaacaactagtgagacagtgtctcaaaggacaattgggaaaaaacagcccaaaaaagttgagaagaacaccagcactgacgagtttacctggcccaaaccaaatattaccagcagcactcccaaagaaaaagaaagtgtggagcttcatgacccaccaagaggccgcaacaaagccactgcccacaaaccagcccctaggaaagaaccaagacctaacatccctttggctcccgagaagaagaagtacagagggcctggcaagattgtgccaaagtctcgggaattcattgaaacagattcatctacatctgactccaacacagatcaggaagagaccctgcaaatcaaagtcctgcctccgtgcattatttctggaggtaatactgccaaatccaaggaaatctgtggtgccagcctgaccctcagcaccttaatgagtagcagtggcagcaacaacaacttatccatcagtaatgaagagccaacattttcacctattcctgtcatgcaaactgaaatcctgtcccctctgcgagatcatgagaacctgaaaaacctctgggtgaagattgaccttgacttactctctagagtacctggccacagctcactccatgcagcacctgccaagccagaccacaaggagactgccacaaaacccaagcgtcagacagctgtcacagctgtggagaaaccagcccctaagggcaaacgtaagcacaagccaatagaagttgcagagaagatccctgagaagaagcagcgcctggaggaggccacaactatctgcttgctccctccttgcatctcaccagccccaccccacaagcctcccaacactagagaaaataattcatccaggagagcaaatagaagaaaggaagaaaaactatttcctcctccactttccccactgccagaggaccctccacgccgcagaaatgtcagtggcaataatggtccctttggtcaagacaaaaacatcgccatgactggacaaatcacatctaccaaacctaagagaactgaaggcaaattctgtgctactttcaaagggatatcggtaaatgagggagacactccaaaaaaggcatcctctgccaccatcactgtcaccaatactgctattgccactgctactgtcactgctactgccattgtcaccaccactgtcacagctactgccaccgccacggccaccaccacaactactaccactaccatttccaccatcacctctaccatcactactggcctcatggatagcagtcacctggagatgacgtcctgggcggctctgccccttctatccagcagcagcactaatgtccggagacccaagctcacttttgatgactcggttcacaatgctgattattacatgcaagaagctaagaagctgaagcacaaagctgatgcactgttcgagaaatttggcaaagctgtgaattatgctgatgccgccctctccttcactgaatgtggcaatgccatggaacgcgaccctctggaagcaaagtccccatacaccatgtactctgagactgtggagctcctcaggtatgcaatgaggctgaagaactttgcaagtcccttggcttcggatggggacaaaaagctagcagtactatgctaccgatgtttatcactcctctatttgagaatgtttaagctgaagaaggaccatgctatgaagtactccagatcactgatggaatattttaagcaaaatgcttcaaaagtcgcacagataccctctccatgggtaagcaatggaaagaacactccatccccagtgtctctcaacaacgtctcccccatcaacgcaatggggaactgtaacaatggcccagtcaccattccccagcgcattcaccacatggctgccagccacgtcaacatcactagcaatgtgttacggggctatgaacactgggatatggccgacaaactgacaagagaaaacaaagaattctttggtgatctggacacgctgatggggcctctgacccagcacagcagcatgaccaatcttgtccgctacgttcgccaaggactgtgttggctgcgcatcgatgcccacttgttgtag

SEQ ID NO: 22639 - DNA, 6084 bp, Homo Sapiens
atgcgggctgcctggctcattaagatgacctgtgcctactatgcagcaatctctgagaccaaggttaagaagagacatgttgaccctttcatggaatggactcagatcatcaccaagtacttatgggagcagttacagaagatggctgaatactaccggccagggcctgcaggaagtgggggctgtggttccacgatagggcccttgccccatgatgtagaggtggcaatccggcagtgggattacaccgagaagctggccatgttcatgtttcaggatggaatgctggacagacatgagttcctgacctgggtgcttgagtgttttgagaagatccgccctggagaggatgaattgcttaaactgctgctgcctctgcttctccgatactctggggaatttgttcagtctgcatacctgtcccgccggcttgcctacttctgtacacggagactggccctgcagctggatggtgtgagcagtcactcatctcatgttatatctgctcagtcaacaagcacgctacccaccacccctgctcctcagcccccaactagcagcacaccctcgactccctttagtgacctgcttatgtgccctcagcaccggcccctggtttttggcctcagctgtatcctacagaccatcctcctgtgctgtcctagtgccttggtttggcactactcactgactgatagcagaattaagaccggctcaccacttgaccacttgcctattgccccgtccaacctgcccatgccagagggtaacagtgccttcactcagcaggtccgtgcaaagttgcgggagatcgagcagcagatcaaggagcggggacaggcagttgaagttcgctggtctttcgataaatgccaggaagctactgcaggcttcaccattggacgggtacttcatactttggaagtgctggacagccatagttttgaacgctctgacttcagcaactctcttgactccctttgtaaccgaatctttggattgggacctagcaaggatgggcatgagatctcctcagatgatgatgctgtggtgtcattgctatgtgaatgggctgtcagctgcaagcgttctggtcggcatcgtgctatggtggtagccaagctcctggagaagagacaggcggagattgaggctgagcgttgtggagaatcagaagccgcagatgagaagggttccatcgcctctggctccctttctgctcccagtgctcccattttccaggatgtcctcctgcagtttctggatacacaggctcccatgctgacggaccctcgaagtgagagtgagcgggtggaattctttaacttagtactgctgttctgtgaactgattcgacatgatgttttctcccacaacatgtatacttgcactctcatctcccgaggggaccttgcctttggagcccctggtccccggcctccctctccctttgatgatcctgccgatgacccagagcacaaggaggctgaaggcagcagcagcagcaagctggaagatccagggctctcagaatctatggacattgaccctagttccagtgttctctttgaggacatggagaagcctgatttctcattgttctcccctactatgccctgtgaggggaagggcagtccatcccctgagaagccagatgtcgagaaggaggtgaagcccccacccaaggagaagattgaagggacccttggggttctttacgaccagccacgacacgtgcagtacgccacccattttcccatcccccaggaggagtcatgcagccatgagtgcaaccagcggttggtcgtactgtttggggtgggaaagcagcgagatgatgcccgccatgccatcaagaaaatcaccaaggatatcttgaaggttctgaaccgcaaagggacagcagaaactgaccagcttgctcctattgtgcctctgaatcctggagacctgacattcttaggtggggaggatgggcagaagcggcgacgcaaccggcctgaagccttccccactgctgaagatatctttgctaagttccagcacctttcacattatgaccaacaccaggtcacggctcaggtctcccggaatgttctggagcagatcacgagctttgcccttggcatgtcataccacttgcctctggtgcagcatgtgcagttcatcttcgacctcatggaatattcactcagcatcagtggcctcatcgactttgccattcagctgctgaatgaactgagtgtagttgaggctgagctgcttctcaaatcctcggatctggtgggcagctacactactagcctgtgcctgtgcatcgtggctgtcctgcggcactatcatgcctgcctcatcctcaaccaggaccagatggcacaggtctttgaggggctgtgtggcgtcgtgaagcatgggatgaaccggtccgatggctcctctgcagagcgctgtatccttgcttatctctatgatctgtacacctcctgtagccatttaaagaacaaatttggggagctcttcagcgacttttgctcaaaggtgaagaacaccatctactgcaacgtggagccatcggaatcaaatatgcgctgggcacctgagttcatgatcgacactctagagaaccctgcagctcacaccttcacctacacggggctaggcaagagtcttagtgagaaccctgctaaccgctacagctttgtctgcaatgcccttatgcacgtctgtgtggggcaccatgatcccgatagggtgaatgacatcgcaatcctgtgtgcagagctgaccggctattgcaagtcactgagtgcagaatggctaggagtgcttaaggccttgtgctgctcctctaacaatggcacttgtggtttcaacgatctcctctgcaatgttgatgtcagtgacctatcttttcatgactcgctggctacttttgttgccatcctcatcgctcggcagtgtttgctcctggaagatctgattcgctgtgctgccatcccttcactccttaatgctgcttgtagtgaacaggactctgagccaggggcccggcttacctgccgcatcctccttcaccttttcaagacaccgcagctcaatccttgccagtctgatggaaacaagcctacagtaggaatccgctcctcctgcgaccgccacctgctggctgcctcccagaaccgcatcgtggatggagccgtgtttgctgttctcaaggctgtgtttgtacttggggatgcggaactgaaaggttcaggcttcactgtgacaggaggaacagaagaacttccagaggaggagggaggaggtggcagtggtggtcggaggcagggtggccgcaacatctctgtggagacagccagtctggatgtctatgccaagtacgtgctgcgcagcatctgccaacaggaatgggtaggagaacgttgccttaagtctctgtgtgaggacagcaatgacctgcaagacccagtgttgagtagtgcccaggcgcagcgcctcatgcagctcatttgctatccacatcgactgctggacaatgaggatggggaaaacccccagcggcagcgcataaagcgcattctccagaacttggaccagtggaccatgcgccagtcttccttggagctgcagctcatgatcaagcagacccctaacaatgagatgaactccctcttggagaacatcgccaaggccacaatcgaggttttccaacagtcagcagagacagggtcatcttctggaagtactgcaagcaacatgcccagcagcagcaagaccaagcctgtgctcagctctctagagcgctctggtgtatggctggtggcccccctcattgctaaactgcccacctcagtccagggacatgtgttaaaggctgctggggaagaattggagaagggtcagcacctgggttcctcttcacgcaaagaacgtgatcgacaaaagcagaagagcatgtccctattgagccagcagcccttcttatcgctggtgctaacatgtctgaaagggcaggatgaacaacgcgagggactccttacctccctctacagccaggtgcaccagattgtgaataattggcgagatgaccagtacttagatgattgcaaaccaaagcagcttatgcatgaggcactcaaactgcggctcaacctggtggggggcatgtttgacacggtgcagcgcagcacccagcagaccacggagtgggccatgctcctcctggagatcatcatcagcggcactgtcgacatgcagtccaacaatgagctcttcactactgtgttggacatgctgagcgtgctcatcaatgggacattggctgcagacatgtctagcatctcgcaaggtagcatggaggaaaacaagcgtgcatacatgaacctggcgaagaagttgcagaaggagttgggggagcgccagtcagacagtctggaaaaggttcgccagctgctgccactgcccaagcagacccgagatgtcatcacgtgtgagccacagggctcccttatcgataccaagggcaacaagattgctggcttcgattccatcttcaagaaggagggtctacaggtttccaccaaacagaagatctcgccctgggatctttttgaggggttgaagccgtcagcaccactctcttggggctggtttggaacagtccgagtggaccggcgagtggctcgaggagaggagcagcagcggttgctgctctaccacacacacctgaggccccggccccgcgcctattacctggagccactgccactgcccccagaagatgaggagccgcctgctcctaccctgctagagcctgagaaaaaggctccagagccccccaaaactgacaaaccgggggctgctccacccagtactgaggaacgcaagaagaagtccaccaagggcaagaaacgcagccagccagctaccaagacagaggactatggaatgggcccgggtcggagcggcccttatggtgtgacagtgcctccggacctcctgcaccacccaaaccctggttctataacacaccttaactacaggcaaggctccataggcctgtacacccagaaccagccactacctgcaggtggccctcgtgtggacccataccgtcctgtgcgcttaccaatgcagaagctgcccacccgaccaacttaccctggagtgctgcccacaaccatgactggcgtcatgggtttagaaccctcctcttataagacctctgtgtaccggcagcagcaacctgcggtgccccaaggacagcgccttcgccaacagctccaggcaaagatacagagtcagggcatgttgggacagtcatctgtccatcagatgactcccagctcttcctacggtttgcagacttcccagggctatactccttatgtttctcatgtgggattgcagcaacacacaggccctgcaggtaccatggtgccccccagctactccagccagccttaccagagcacccacccttctaccaatcctactcttgtagatcctacccgccacctgcaacagcggcccagtggctatgtgcaccagcaggcccccacctatggacatggactgacctccactcaaaggttttcacaccagacactgcagcagacacccatgataagtaccatgactccaatgagtgcccagggcgtccaggcaggcgtccgttcaacagccatcctacctgagcagcagcagcagcagcaacagcagcaacagcaacagcagcagcagcagcaacagcaacagcagcagcagcagcagcagtaccacatccggcagcagcagcagcagcagatcctgcggcagcagcagcaacagcaacagcagcagcagcagcagcagcaacagcaacagcagcagcagcaacagcaacaacagcaacaccagcagcaacagcagcaacaggcggctcctccccaaccccagccccagtcccagccccagttccagcgccaggggcttcagcagacccagcagcagcaacagacagcagctttggtccggcaacttcaacaacagctctctaatacccagccacagcccagtaccaacatatttggacgctactga

SEQ ID NO: 22640 - DNA, 2655 bp, Homo Sapiens
atgccagcggaacggcccgcgggcagcggcggctcggaggctccagcaatggttgaacaactggacactgctgtgattaccccggccatgctagaagaggaagaacagcttgaagctgctggactagagagagagcggaagatgctggaaaaggctcgcatgtcttgggatagagagtcgacagaaattcggtaccgtagacttcaacatttgcttgaaaaaagcaatatctactccaaatttttattgacgaaaatggaacagcaacaattagaggaacagaagaagaaagaaaaattggagagaaaaaaggagtctttaaaagttaaaaagggtaaaaattcaattgatgcaagtgaagagaagccagttatgaggaaaaaaagaggaagagaagatgaatcatacaatatttcagaggtcatgtcaaaagaggaaattttgtctgtggctaaaaaaaataaaaaggagaatgaggatgaaaactcctcctctactaatctctgtgtggaagatcttcagaaaaataaagattcgaatagtataattaaagatagattgtctgaaacggttaggcagaatactaaattcttttttgacccagtccggaagtgtaatggtcagccagtaccttttcaacaaccaaagcacttcactggaggagtgatgcgatggtaccaagtagaaggcatggaatggcttaggatgctttgggaaaatggaattaatggcattttagcagatgaaatgggattgggtaagacagttcagtgcattgctactattgcattgatgattcagagaggagtaccaggaccttttcttgtctgtggccctttgtctacacttcctaactggatggctgaattcaaaagatttacaccagatatccctacaatgttatatcatggaacccaggaggaacgtcaaaaattggtaagaaatatttacaaacggaaagggactttgcagattcatcctgtggtaatcacgtcatttgaaatagccatgagagaccgaaatgcgttacagcattgctattggaaatacttaatagtagatgaaggacacaggattaagaatatgaagtgccgtctaatcagggagttaaaacgattcaatgctgataacaaacttcttttgactggtactcccttgcaaaacaatttatcagaactttggtcattgctaaactttttgttgccagatgtatttgatgacttgaaaagctttgagtcttggtttgacatcactagtctttctgaaactgctgaagatattattgctaaagaaagagaacagaatgtattgcatatgctgcaccaggaaagaattcctagaatgtatgtgtcagagtttacagatgagggcttctttgaaggcaaattgccctccagaaaagatttatatgatatacgtccatatgaaaatacttatttactcaagcttcataccaattttgagattttaacacctttcttattgagaagactgaagtctgatgttgctcttgaagttcctcctaaacgagaagtagtcgtttatgctccactttcaaagaagcaggagatcttttatacagccattgtgaaccgtacaattgcaaacatgtttggatccagtgagaaagaaacaattgagttaagtcctactggtcgaccaaaacgacgaactagaaaatcaataaattacagcaaaatagatgatttccctaatgaattggaaaaactgatcagtcaaatacagccagaggtggaccgagaaagagctgttgtggaagtgaatatccctgtagaatctgaagttaatctgaagctgcagaatataatgatgctacttcgtaaatgttgtaatcatccatatttgattgaatatcctatagaccctgttacacaagaatttaagatcgatgaagaattggtaacaaattctgggaagttcttgattttggatcgaatgctgccagaactaaaaaaaagaggtcacaaggtgctgcttttttcacaaatgacaagcatgttggacattttgatggattactgccatctcagagatttcaacttcagcaggcttgatgggtccatgtcttactcagagagagaaaaaaacatgcacagcttcaacacggatccagaggtgtttatcttcttagtgagtacacgagctggtggcctgggcattaatctgactgcagcagatacagttatcatttatgatagtgattggaacccccagtcggatcttcaggcccaggatagatgtcatagaattggtcagacaaagccagttgttgtttatcgccttgttacagcaaatactatcgatcagaaaattgtggaaagagcagctgctaaaaggaaactggaaaagttgatcatccataaaaatcatttcaaaggtggtcagtctggattaaatctgtctaagaatttcttagatcctaaggaattaatggaattattaaaatctagagattatgaaagggaaataaaaggatcaagagagaaggtcattagtgataaagatctagagttgttgttagatcgaagtgatcttattgatcaaatgaatgcttcaggaccaattaaagagaagatggggatattcaagatattagaaaattctgaagattccagtcctgaatgtttgttttaa

SEQ ID NO: 22641 - DNA, 82262 bp, Homo Sapiens
ccgctttcgtctccgtcctgctgccgttaccgccgctgctgccgccgcttgcgtcccccgctccggtctgtggtgcagccgggacccaggaccatgtctttgtctcgctcagaggagatgcaccggctcacggaaaatgtctataaggtgagcgccccccggcgccgagctgagcccgctccgtgtgcgcccgggtcgcgcgccgcccgcgcgcccgagcccgaccagggcggccccggggccgcgcgccgggccaggaggctgggactttgggggtcttcccggcgcggccacccgggacccgggctgctggggtggtgagcccggcgccggccgctcacaggtggccacccccgcccgggcccccccatcccatgcgcgccgcggcccggtcagtccccagctccaggcccggggagcactccccgctccgacggccctgctcggcccccgcgcgctcgccttggcgtcggcgggaacggagccgcgcgccgggccccggaagccctcggaccggtcggggtcgtagcacacccgggcagggccggggcggcgggggcggcgggcccaggggttgcggcggccaggacggcatgggggctgtctgaaggccgcggtcggcgcggtggcaccgtggggctcctccaggcgcggttgcgcgagcctcgggcacttcattctcaacaggctttcccttcccacaactcctgcccggcgcccatgctggggcctaaggtgggaggtcggagcgcgggcaggctggatgggtggacggataatctatcatcttatgtaaccgcggagagagaagactaattgtgtaggaggctgacgtgcctgcctttgcttcagatgtgttaagagtggcatccacgttctcgtctgcgaaatgacaggttcacatccaagggccgcagagcaccgctggaagcctcccctgccgccccctccccagtcgtttttgtggctgggataccgacaaacaggcccttggttttctctttcttcagcatccgttctcggtccagacccccacgcctgagcccggcagctgccggggagcattttctcagaggagaaacccctgccctgggtgtccctgggtcctgggcgatctcttacagatgtgctttgtttcaaaactgtctgcaggttcagtgacaggctgggcgatgagtggagtgggtatttacccggcagtcgctggttcatgtttcctaaccggcttgcaccctgcccggcagagtaactgtttctgattgtggtaggcggccaaggcgtgcctggccaggggcctgggaagccctcttagctctcaggcttgggagagccagatggaggcttcaggggtggcccctctggttccagctggagtgcagggggccgattgcacttgaatacagctttcaataaagcttgtgaagttggggccgcgtcagtctggaaggtttctgaaggcgggtgtgcggtcgactagatgagtcctaaagccacgtcggagccactgggaaacaggattcagggtgacctgaggagtcggcttgggaaaggcacaggccctggggttgttaagtttggtttcacagagtctgtggcatacggttctggccttgttgctctgtggaagcacatgttgtcaagggagggaggtttattaaattattagtcattagctccattacgacttgtttgtgattgcagagggtggaagagaagtaccagcggaacctttttcctattttttctccttctgcgctgaaaccagaaagcaggaactttcgtggtgagagttggcagggggtgagtacatggagtggttttgctctgggggaccgaccccgtgatcgtccttaataaaactctcctaaccgggcagtcggccttcacctaggtgaagctgtaatttatctgcaggtctaagtgaaatctgctggcaggaaaactcttaggactgagtgtttggggactttgagcccctgtggacgcagaccagctggtctggagcacgtgaaacacacaggttctgcgttttgtcttccacgggtgggttaattggtgattttcccaagtgaagatgtggcggttgatgatttgatttagcacggcaggacgcggtgggccgcaggtgtctgaagggtcgatccactctggaaaggctttgccctggtgacaggcttgcgctgctgctgctgcacacaggcggggttggttttgtaggtaggtggctcctgctgccactccgggagcctgactgctgagtctttgagacctttttgtgctttgtcactggggagctcaaggtgccttggtagtgccggtactggttgggcagcttttggcaatgtcagccaggcagaaactcagcccacatggagacatagtcaggagaccgctgaggccaccggtgtgcactcctgggccggtccagccggtccaggcagtgctgagctctgtcctctcctgggacggtgctgcctctggcattccttcccggggccgctcctgtgcctgggttggcggcttgcagagccctggcagtgcctcttggaacggctgtgctgtggcctgcttagtgtcacccgcgatgcggctcagctgtttggtttggtttggacattgcatcgccttaactgcagttctgagtggtgtttgccttggcaaaggaggacgcttgtctttggccttggtgattaaaaatgcgagaataaaaagtgcagttttgattttcttccccgtaagaatccgtaacgcagactttgacctcttttctggtggctccattcccttgggagctgtgtcctcggggaatttcatggaagatgaaggggaggggagtggaacggcttcccggtgtttgccgagaacataatctcagaccttctgggggcactgcgtgggctgggccctgcaggtgttgggagggcaaggcgcggaagaccccttcctccacaggagcccgggcccagcgcttgctcaggttgccctgggtagtggcccagatggagggatggagtgctggaatctgcctcccccggtggcctttggaattaaggctactgaagctgcagccctcttggggaagccccgtgcatccctgtgtgctgaggggctggctccctggctggctgtggctcctggaatgccaggagaatgtcaggtgggtgttttcctcaaggtctcgtgtccgcagagaagccctggctcccaggtgacccatgacctggagtgtggcggctccaccaccttctctgggcatagtgccattggcccacagcctgtcctagaatatgtgaggttgagagagcatctggggaggaggaggagtccctgttgcagacgtggccatggccttccttgtgccgaggctcttggccctggctggtcactctagcagctggtggggaagccagcctggcggggccgcagccgtgcttcgaggagacgggtgccacagggttcctggagccaggagccagttgggtttgccgcctctggtgtgattggtaagggctggcgccaggtggtgggcgtcatgtgctgggtggcagggagcacactgccggcttttctgctccgtgcccggctgcccgggcctggctgttcctctctgccacatccagcttcttcctggggtgtgcagagctcaccatcccctccatttggagacggtggggggtggtctctgacaggcacctcctgctgacaggcacctcctggcattggagtcgccttcctcgagggggggcagcagacccggcacctgaggaggagagaaatcacagtgctggacccagctccgtgcgcgtgtacatgtgtatgtgtgtccgtgtgtgcacacgtgcatgcagtgctttgtgtttaaggatacttcctggggtggcccccatgggcaccatcttgccgcagggtggctgggtctgctgtcactgagtagacctggcctgcattttctctacatgtgcatgtctgtgttacccgccctcgccaccgccagcctttagcagggggcacgtctcccaggagcagtgctgatgtggtccccttggtggggtggccagggcacaaagaccggctgccgtgtcatgctgccctctgggctgcccagcctgtgtgggctttggccccaggcactgtcctgccagttgttggctccagggtgtacaacccttctgctggtgcttgctcagcgtcccatgcctgctggctccaggtggcgtccagcgttcgcttggtgtcccatgcctgctgtgccgttggtggctgcatgaagtccgtgtctaccgatggatgtggccaggcgttctgggatgtggcgcttgtggagttgtgggctgcttgggggagagtgtcctgcccgtgcctgctgtccccacagccttgccttgagcaagtattcttcgttggggagattggttggctcgtggtactgcccgagtggacctgaggttcaggattaaagtgaaggccggtgctgccctgggctttcaggggccaccgttagatgggagggcagtgggtgggggctgctgggagctgtgttcctgttgctgccttgtcttcgactgaagcttccaaaggtggagacctgagggccaagccctgtctgctggctacaggcaccatgggctgaactgtccaggataggtggtcttgcaggggagggctggtgtgtgacctggccattgaataggaggggcctgtcctccttccgagctccaggaggcagactggccgggaggctgaagcccggttcacccttctccccagttcacaggtctgggccctggtcaggggagcaaccccagcgtcactgcaggagtggcaggtggtgagcagagctggacatcaccacttgtctccacccagccttgcatggccctctctgccagctgccctgggctagtgttgcctgtgggtgccaccatgggtggggacactcgccaccgtctgtggaggcggggtgccactgactgctggttgaggctggctcctgtccttccttacattgagccagagtctgccctgtgttgccttcccagccaccttgtctggtgactttctttgaggccccaggatagggaagcatctttgtggctgcacagagcccgtggtcccctggaagctctgcacttgggcagccggcgccgtcagccgccccccacagcctgcgctaagatccctagtaattacaggcaggcggggatggtgctggcaccggcctccaacgcacttccacctcccccgagcgctgattcattcctggcccctggctgtgcctgtacagctgcacaatgacttgaggggcctcaacccagaggcagaaagggaggccgagaagggacccgtttggctctgtgactgcaagggcttgatctgtcctgcccacggattcctcctttgggcgtggaacagcggccagcctgtgaggggcccatcggtatttgggaatgaacacatcttgtttctggattctggagcattcatgcttgaatcactgtcccgcctttgctgagggtctgctccccgggcggtggcctgggccctctgagagctccctggaggtggtggcagctcacaccacatgcagttggaatccctgtttcccagggctgtgggcagtgcaggctgaggaggtggccctggtgtggggctggcctaggcaggctgagggctatttctcctactgtggcccaggggctcttggtgttggtcctgcaacaaggggaccagaaagcccagggagcaagagtggaggaggctgtggagatggtggggaggtagggcctgagcccatgctgtgctgaggagtcccctctagggggcaggaggctggggatctgcctctggcgggggcccgtttctgcctgtcaggcacagtggcgcccccagcacctccctcaagttaacccccatctgcccctggtctttttgactcacgctatagagccttgtctgctggctcttggtttggtcacccctgagctttggaaaatgctgcctggtccttgggcttcctgccaggcctgccgggaggagtcttgcctggccagtcccctggccatatgaccttggccaaatcttgctccctgggcagtgggtacagcgggcaggatgctcccagggtccctggaggctccggggcctgtcccaggtcaggtggcaccagccttggtatcctcagtgctctagtcctcactctgatgggcaggggtgggatgcacgcggcaccatgagatctgatgtcctgggccatgaggtgctggggaccccttgttgggggaaaggctgtcagttacaacagggtgcttttgctcttgcttagagtttttattttatacttactggaacagttgtcttataattgggtagtgttttttcgttttttgtttgttttttgttttttctgttttgtttttgttttgtttttggagacggagttttgctcttgttgcccaggctggagtgcagtggcgtgatctcggctcactgcaacctccgcctcccgggttcaggtgattctcctgccccagcctcccaagtagctgggattacaggcatgcgccaccacgcctggctaattttatatttagtagaggtgggatttttccatgttcgtcaggctggtctcgaactcccaacctcaggtgatccacccacctcgggctcccaaagtgctgggattacaggcatgagccactgcgcctggccctgtttgggtagatttttcaataatcatatattgaattcatgtgaagtaaattggtagggttttcttaaaacttatttttcatgaagagtttgacttctgagtcacatttcagctctgggctgtcagtgtgcttgtccactgggcacctgcccctgagccgtcaggggtgccaatgccagaacacctcctgagtatgtctctgagattttcttccaagcccctgctcttccatttttgttactggcacttttttttttcttttcttttttcttttttttttttttggagacagagtcttgctttgtttcccagcccggaaggcaatggtgtgatctcacctcaactgcagcctgaaactcctaggcttatacagtcctcctgcctcagccacctgagtagctaggaccacaggcgtgccccacctgtgtgcctggctaatttttttttttattttaatttttggtagagatgaggtcttgctatgttgcccaggctggtcttgaactcctaggctcaagcagtcctcccaccttggcctcccaaagtgctgggattacatgtgtgagcaaacgcaccctggtgctttcttgatcagcaggttttcagacaacggccaggcctcctgttccttcttcggatggtccttatgtgttttgtacactgagctgtccaggcgtgcccctgcctggttgtggcaggggacagtcagcaggtgggccatgccaggtgaccgcctgcttgtcatggctgccccagtgggagtcgcaggacgtgaatggtggaatgcgctggggtagcacaggtgcctgtgccggaaaacagcgacatcttgacattagaatgggggtggggatggtggtgggggagagggtgtcccctagccgcaggagctggaatctgtccagtagagggtttgtctcacccagagccaagcttggtctgggtggatgctgctagtggcgggcagagtggccttgctgcttccaggcggggcttttaatttaatttaatttaatttaatttatttaagacagagtcttgttctgtcacccaggctggagtgcagtggtgtgaccttggcttactgcagcctctgcctcctgggctcaagcaattccaagaagctgggattacaggtgtgcgccaccacactggctaattttagtatttttagtagagatggggtttcaccatgttgcccaggctggtctttaacacctggggtcaaatgatcctcccacctcggcctcccagagtgctgggattacaggcgtgagccactgcatccggtctaggtggggcttttaaaccagtgggtgtggtggaggccgagatgccaccacctgaaatgaagtggacctgggtccccccatacccgtttttccagccccctcttccgtggccgactatgtctgccagaggaggcctgtgtccatctccatttgccccaccacggaaagcccgtcctcacgcagtccaggcatggatggagcatcagcctccacctgtcctgctcctgggctgagactccagggcctcggtggccccaggccgtggagcagagctgtgggctgcggtccgaccggtggcaggagtcccatctagggatgtggctgtgaagctggggtgctggggcctgggcggtgtcactgctgtctcatgctctggctctggggacggctgggcccacagcgtcctggcacccgggaggccctgtcactgctcacactggagcgtcctggcacccgggaggccctgccactgtgcacaccggacactgcgctggacattctctgtgctcagcctcgttactgttgcttcgtgtgcgggtcctgggtgtccctgcctgacaggggatcctcggttcagggagaagtgtgtccccgcccgtaagctggagtggctgagctcattgaaactgcagagccaactccagggccctctggctctccagccgcgcgtctgtccttccgttcgggagttcgaggagttcaggaaggcgttctcgccgcggggtctctgttttctcattaattcagtgagacgatagcgtatttcctggcacagagagtactgggtaagtggtggccacaatcgctagcttgtgggacagaaagttcttcagagatcagaggtcagtggtccagagcaggaaagccccgccccgaagctgcttgccactgtctgctttcctgggatcctgtgttcctgagtgtggccacagcccccgggctggcacctcccacctgcctgacctgaggttggtgggaggtggggccatacaggcattcctaagctgcctccctgcttgctcagccacggttgctcctccagccgtgagcccagcccgaaagaccggccagtgccttcacagggaggggatggatggggcagcggcctcggggattcttgcaggccaggcggtgaccagacttgggtctgcgattggcggtaatgagtgacctagtgaccgggcctttccacgttggagggggaccaacacggcgccacagactggtgtgcccacaggacggccgtggcacctggctcgtccctatgttatctgtgccctctttcttgtaaggcgctggtcctatgggattagggcccgccctagtgaccccagttacttttatcgccttcctaaagaccctgtttccaaacacagttgcactgcgcgatgccggggcttagaacttcaacacgtgcatcttgggaggggacacagttcagccgtgacacccagcggaccccacccgtgacggagtgcagtagctgctggaggggccgagtctcccatgttgcctggaggtgaccacctgtctgtcttcaggctgattgtattacgagcctatgatggttttcccttccaacctcagtcagatcgcagcccgcagtttatgacaacaggaaggtttccacggggacagctgattctattggacgagcagtcagctggcaaggcgccagctcagtgctggccacaggcgaaaggcagccggaatgcaccgtcccgtgtgggccggacaccccgtgaggctgagcagttgctaagttctgtgacccgggccagggtggccggacattggaaggtgtgtgtaaggggctctgtccccattgaagctgggataggcaggatgtgcctctcggacaggaaggaagtggccagactgcttggtgctgtgtttggactttgctgggctgcggctcctcctgcgtgggccgggtcatggtgtcctgcgtgcaaggccccacgtgtggcttttgcccttgtggacctctgctccttgggacctcgttcaggagggctcagacttggggcccctgagagttgaggacgccaggggaaagctcgcagagggcgtgcaggtgtccaaggcccatggaaagggagatgctgctgcaaccctgaaagggaagcagggccccaggctggggctgggggcccaggggaatggccgtgtggcccttcccacaggcggagggcagaagcgcctggctcaggagctgaccttagtgttggcatttgtccctgttgtttttagctgcagcattcatggtccctgtcctggggcctcccaggagcctggcgggtagggcaggcagcatgagggaaggagtccctgcacctcggacccctcctggcgggaggccacctgctcctggtcatatctgggcaccgtgccaaagacacaaggaatcactttattatgatgtggatggcttttctgtgggtgctcctggaggctgagaactggagctaccaccttaggggacatcccagcccctcacgctgatcccaccatgacccatggccaggctgcccggggccctgcaggagtccctggtatgcgtgggacctgggtgtctcccttcggtcttccaggaggggctggggtgtgccctccatctgtctgatctgagtggctctgggggagtctgggtcagccaggccacgccgaagctgcccttggagaagcctagtggcccctcctgaccccccggggaagggtgggggaccagccccctctgttgtggaacaggctggcctcttcctgcctccagagaggtgcctgcttcctgacacccagagccctctgcggggtctcatggcctgggggggctcatggtgggggcccctggcacggcagaggggtttggccacccagttttcttctcccctcggctgtggggaccctattaatactcacagggaggcagagctgccggctcctgcacgcccagctgcagggggtaaggaggaggatggtgtctctgcctggtttgtcaccgtcccccttgggatcccgttctgcaggctccagcccaccttcaggcccccgtcctaaccctgcgcgccgtttcctcccagaaacttccatgcatcccctcgtttcctaaatccgtgtacatgtgtttgtagtttgtctccgactcaaaccaagtaagatgcagttcaagatctgcctcctccaggcagccctcccagctgtgctcctggagttggttttcttccttcaggaaggatcctccaggacagatgtccaagtgtttagaggggacaggactgtccacaccactccagccaggcttccttcacacccccacagcccccactcctcttgccctgtgagccagctcccaggctctggagctcatcggtgctcctgtgtgtggggtcagcagtggcccgccctggaggacgctgccaccttcccgatgctctctgcccacagaagtcccccaacccccctggcagccaagggaactgagcctgtggcccccggacagcaagctctgaggtgtcctcccgcgaggacactgtccactgctgcagggcccctcctgtacctccctagtccatgctgtacatgaggccgggggtttccaggcttggctctgtcccgtgcgcccttccctggagcctggcatcctaggcagagtcccgtcaagtctacgtggaccagagtcgtgggtgctgtgaggtccgtgtctgtgtgtggggtcctcatgctgtggctgtggtggcacagcgggctgggggaagcccctctggcactgccggccccgcagctgccaccggcttctgcctgtcgcgacagaggtggaagtgagggcggtggtccagtgagcaacagcagcctggcccctcaggagctgtgctggtccgtgggcgagggagtgggtgggcagggcccctcccctcaacagtcagccaccctgggcattggccctcctgggagaggccaggtggatcgagtcaccctttttcctgatattactggaatgtggcctttgggagcatgtcaggtgcaacaccaggaccaattgggagagagggaccgggctggctgtgtggtcagcagggttgaagccaggactcggggctccaccaagagctgacaggctggcccctgccttcctgagcctcactttcatcttgtccagtgtaagatgggacagtgactctcatggaggggctgggtgaggattagggtgatgagggtctaaggcagccggagagggtcctagcatcgactctttctctgtttgttcttctgagtagatagaaaacacggctcagcctggccacacacagacacatgtagcacacacacaggtccacatgtgtccagcacacgcatgagtgcacatgcacaggtaaacacgttcatgcccacagcacacacatgggtccagctcatgcccacagcacacacgggtccacgtgtgtccagcacacgtgtgagtgtacacgcacaggtaaacgcagctcatgctcatagcacacacacaggtccatctcatgcccacagcacacgcacgggtccacatgcgtccagcacatgtgtgagtgtgcatgcacaagtaaacatgcagctcatgcccacagcacacacacaggcccagctcatgcccacagcacacaaggggtccacatgcatctagcacactcgtgagtgtacatgcacaggtaaacgcatgcagcacatggccgcagcacacacacggatatatgtgcatgcatgggtccatatgcacgcaggccctaggggtgtggccatacgcgcccaccctggcatctgccttgaggggctggagggaggtgggggacactctctgtcagcagagagactgcttttgtttgtggccatcctgccaggaaagcgctggagaggcggccagcgtcacaggaaggagagccaagggataaacagaattcctggccgggagcagtggctctcgcctgtaatcccagcactttgggaggctgaggcaggcggatcgcttgaggtcgggagttcgagactagcctggccaacatggtgaaaccccgtctctactgaaatacaaaaattagctgggtgtggtggtgcacacctgtaatcccagctgctcaggaggctgaggcaggagaatcacttgctgagaatgcaccactgcactccagcctgggcgacagagcaagaccctgtctcaaaaaaaaaaaaaaaaaaaaaagaattcctgagcagacggaaggtggaccccagcacggcccaggagtgggcaggagagcaaagtcctttggcagaggtcctttctgtaaatgtactggccactctccctttgttccccaagttgggaggaggtggagatgacgggggttttgctgctgccttgtgcccacactggccaggccggcccgtagcactgaatcataatggccatcagtctccaggctggccagcagtgtccagcagctcgccagccaaaagggctccctgggctcatcaatgttctctgacggccacctctgcaactgatggacacggccctcccatttgtaccttcagaaatgcatagctggggtccctgggggctgtagtagggacagctagggtccctgctgtggtcaaggcctggattccatgcgactccagggccactgggacatccgtctctgtggacgtcccagcaggagggcagccaagcgtgcgggcatccctgggcagggacccctcctctcccggcacttcgcggcatgcgtcctatgaggggaagccttccatggcgtgtgtgggagcccctcgtgggccggaccgccttcatgggcaggacccccttcataggcaggccggcccaggaccccccctggggtgggaaaggtgttccctggtcaatagtgaatgaacaaacgaggaactggaagtccgtgccggcccgggaacgcggcccagggagccagtgcgtggtcgccgggggcacagcagagctctgcacgcgccgggctgcgtttgtactgcacaggtcctggagtttgaggagtgtggtggttgctcatggtgtaggatttctgtcctggcaggggggcatggggtcacagaacgtgggcccctggggagctctctctgtgcctgtggccccccaggagtctctcagttttgctgtggtcttgaggatggcacagcgtgtccctgagcgccctcagtgtggacagctgggcttcaaactcacttcagagccgccgtgtgggggtggcgcctctgagggcttgaggttattttcttgtgcggtttctctctcctggcctaggtttttctgggttttttgcacctcttggtgttgataagaaacaagctcccttccccttttaaagcccacagactttcccgatctcctccccatcccctgccccagcactgtcagggcgtctgggcgtctgagctcagctccttcctggtggcatcctgcaaaaagatacactcgctcagtgactcggaaaagccacgtcggtgtggctgagaacagagttctttccacctggggccgctgctgttggttttcattccggaagagctggagctgcctgtcactggctcccctgcccccacctggggacccccaggcactgcaaagtgcctgttggctatgggcccccggaccaggaccttggcctgattaggggagccggaggtggaagtggaggcgggactggagtgtatgccccacagtgggctctcctcaggctggggacttccacacgggcccactgggtcaggatggcccgtgcctgtgttctaggataatgggatggactggttcggaggctcagagagacgcctgaccagacgcctgactggagatggtctcccagcagaggggctgggctcttcaggggccactgggctcctcccgtggttcctgggagagggaggaacccggaggaggggtgggtggcacctacagtgcgtgcctgaggcagggctccacagaaggcctctctgctggcccagcggctggatgcagatgcagaaggaggaactggcccttccgcccgcccgggaaggggagtccccccttacaatgttggctcagtgggatcgatgcctctgccattgccttcgggccaggacagcagcacttgcgtgtcccggccgccgcccctctcttgcagatggaggcagggccgtgcccaggtgtcctggtggctgttccctgcccgctgtctcctgcattccttccgtgtgagctcagctgctgcactaaggaagcgaaaccttggtgctgccccgtgcgtcatgcggtaggcatggccgccgtgctgacccgccgtggttggccctgggtggctcctggcctgtttctcctgctgctcaggatgttagtggagctcacagggctcaggttgagcctcttccacccgggggcctgtgggggtcatggtcctggagccaagcgcgtggggctcttgtgagcaaggggtctgctctggcacgcccacctccgtggtagtgttttcatacctgtgtcacacagggtgagaaacatgcttgatgctgcagctcagcacacacacgcacacaaatgtgcacatgcacacgtggacacacatgcacacatgcatgtgtgtatgcacacatgggcacagatgtgcatgcagacatgagcacacgcacaccagaacactagagtcggccgcatcctcctcacttggctgatgcccccttctgcttgatttcatcacaagaaacgcgcatccggcagcatttcccgaccgccttcaccgccagtcccggtctgcatggtcagtttgaaccaggctgccgagagcgcaccaggtcccagcattctcctctctgctggtaactcttcaggcattgtctctggctcacgttctcctgggcgccagacctatctcaccccactcccggtgtggcctccctgccccggctcccaggcactcctgggagttaaagtgtccaggctcctggttcattgctgagtgtttagctcagtgctaacgctgctgtgctccagcatccccgtccctttaggacagaggcctgcgtggtacgtgcctctctgctccagcatccccgtccctttagatcagaggcctgcgtagcacatgcctctcttcccctctgacatcccagagcctctgatgggtctcccagcatacgccagggcccttggctaaaatctagtctcctctgagcagccagagggatcttctcttttgtttgttttgtttttttgtatttatgtatttttttgagacagagtctcactctgttgccaggctggagtgcagtggcgcaatctcagctcaccacaatttccgcctcccaggttcaagcgattctcctgcctcaggctcccaagtagctgggattacaggcgtctgccaccaagcccggctttttgtatttttagtagaaatggggtttcaccacgttggccaggatggtctccatctgacctcgtgatccgcctgccttggcctcccaaagcgttgggattacgagcgtgagccaccgtgtccggcctgttttattttttttagagacagggtctcactctgtcacccaggctggagtacaatggcacaatcacagttcactgcagctttgaccttccaggcttaagcaatcctcccacctcagcctcctgagtagctgggactacaggcatgcaccaccacacccagctaatttttaaatttttagtagagatggggtcttaccacgttgcccaggccggtcttgaacgcttgggctcaagtgatcttcccgcctctgcctcccaaaatgctgggattatacgtgcgagccaccgcatctgacccagcggaatctcttaaatgtagctggcccatcgttctgctcagaccctccttagcttcatgcagccgggcctcaggggctatcccattagcacatccacctcttcctcttcctgcctcccctgggccccttccaccctcacgccgggtcctgctttcccaggaactcaccatgggccctgcctcggggcctttgccctgccctggtctgcccactgctctctggcatggaaagtgcttccctgcctgccttccacgtctcgctgagcacgcctatcccacttctgcggaagcgctggccctcctagtcctgccttccctcgggagatgttggctctgtgcgagcagggctttgcggctgggtcgatgctgcatcccccacccccgtgcacgtggcctctgggctagcacgcaaaggcgccctcacccttgctgcgtcctggaaggaaggagcacctgccctggaacttggccgggtggcgttaccaccggagggtccagtataggcaggactgaggtgtacccggcctgctgtgagccccggcgtagtgcagaactcggggcctcgtttcccaagaacacacaccctggccatacctcagggcaggggatggaacactcgtcaaatagcgggttttctggaggcaggtcccgtggtggggagtggcttccttgtccctaaatgccctttctatctgttctcttggcttcggaggctgaggccaggtgctgggagagggggtgggggatgcagttgcccttccctccccactctctagcccacaggttggggctgggtgggttggggccccacagcctcctgcttgtctgcgacagggctgggcggcttcccttcctgtgatcctcaggaaagatcaggatcacatcataacaaatgaccggaagacacgggaggtggctgagctgggggtttctgctggagctgctccctgggcccttgctggcaggggctggctgttgacagtcagtgtatgttatgccggtagaattctcatttggctgttgtttgtgtgtgcctgtttttatcccttgtaattaaaacatttatttggccttcgcagtgaaaatctaatttcttgagtctaagaactgctgatcttggcaccgagatgcccgtccgtcgggcaaacagacccagagccgttggattattcatagcacggcatctgcagatcaggctgcagtggtgctaatcagagctgaggtttggtaattgatgtgttgagcaggattttagtgggaggggggtgccggcgtcgttgagcgattgtgtatggccggtggggggcccttctgggctgactcagccgcgccaatgggaacggcacctcggcagcggcgcgtctgagcgccagttgtattctgcctgctgcaccatgcaaatgcgctccttcagcccgcagacactcctctgcggccgggtttcttcttaccccctttgcacaggtgtgaaaaccgaggctcaggaaggtcattttcccaaggacattgatcaggggcatggctgggatttgaacttgggaagcccaccttgagcatttgtggtgtcgacccccaggaggggtgcctgctctgggttttctcctctgtgttcggacccttcggagtcaccagggtgacctctgccagtaatgctgtttcttctctgctttcttccagaccatcatggagcagttcaaccctagcctccggaacttcatcgccatggggaagaattacgagaaggcactggcaggtggaactgcgcccgggccccgtggggtgggagctgcctcctgagctggtagaactgcgcccgggccccgtggggtgggagctgcctcctgagctggtagaactgtgcccgggccccgtggggtgggagctgcctcctgagctggtagaactgtgcccgggccccgtggggtgggagctgcctcctgagctggtagaactgtgcccgggccccttggggtgggagctgcctcctgagctggtagaactgtgccctggccccaagggtgggagctgcctcctgagctggtagaactgtgcccgggccccgtggggtgggagctgcctcctgagctggtagaactgtgccctggccccaagggtgggagctgcctcctgagctggtagaactgtgcccggaccccgtggggtgggagctgcctcctgagctggtagaactgtgcccgggccccgtggggtgggagctgcctcctgagctggtagaactgtgcccgggccccttggggtgggagctgcctcctgagctggtagaactgtgccctggccccaagggtgggagctgcctcctgagctggtagaactgtgcccgggccccgtggggtgggagctgcctcctgagctggcagatggacttgggcacagcctgtggggcctggtcaggagcgaaaggaggtcttctgttccagcaacaaagctggacagcggctctgagtgaaggtgtagcccatgcattctggactgggtctgctgtcactgtggcagcacgcccctgcctgtgcgggctgctcttgtcctgtggcatctagagacgggaggggtgcggatgtcagtccctcaggatcatgtagaaactgtgggatcagggctgggatgaagctgttggtaactgcagcagcttcgggtttgagaaatgagcgaacgccctgcagctccttctcacaaagagccgggacagagggtgtgggggactggtggctgcagggacattccattcttcccactgtctccctgagacgcttcccatcgcccccaccccacccaggcactccactgcggggccttgggtgcacctgggtctttccgtcctggtggggagtggcttccttgtcgccagatgcccttctcacctgccctgttggccccgcaggtgcccttggctgagtcctgccatggatggggacttgctattcttggacagtgacccccggtctccctgtaccctctaccgtgtctgtccctgtaactgcagcatcttcatgggcagagtccacatccccagcagggaggagatcgtgtgttttccgggacacgtgctgcgtctctgccggcgcccccggctcctccaccgcttcctggtgttgcggcacccatgggttgggtggagttggttgtccagttttggtgccaggttagaggtgtcaaggacggggcaggagttggtcagccctcgttccttttttaccacctttactccgttgtcacctggggagaaagcactccaaccgagcacctggcagaaggcctgtccctggcactgccctccttctcagctccccaggtggaccagttgtgcccgcctgccacatctagttgggggtggccttcatgtttccttgtgggcatgaatgggacagggagctcccttgggccacctcctgtttgcacccggcaccctgcaggggcccccatggctgccccagcagcagccttgtttctctccaccctgcccctcctctacatccctgggcccggggttgcacccgagggacctgctcatcaaaattgtcttaaagagctgtccttcctccagcgaaagtctgcagggtgttttgtttttttttgagacggagtctcactctgttgcccaggccagactgcagtggcgctatcttggctccctgcaaactctgcctcccgggttcacgccattctcctgcctcagcctcccgagtagctgggaccacaggtgcctgccaccacgcccggctaattttttgtatttttagtagagacggggtttcactgtgttagccaggatggtctcgatctcctgacctcgtgatccgcccgcctcagcctcccaaagtgcctaggattacaggggtgagccaccgcgcccggccgtctgcagggttttcatgacagtggagatgcttgggctgtggcagtgacccccgtcccccagccaggagcttcttggatgaggtagtggaggtcggcagcagagcctgtggcagctctgagggtcggcgtggcctcctggtggaagttgcacctggtttgcttccctatggtgcaccccagttgttgggcagcttcatgggggtcccagggagagctgcctttgcctctggcctgaaatgttgacgctggagagaggctcccgaatcagagtaggaaggctgaggcccggctcgaggtgggtgcagagggcttccaactgtggtgaccccatgatctctaggcacagcacacgatgtccagattctccgggcccagctaagttccgtgccctgtgaatgagaccagttgttcatctcttcctggctgggtctgaatcttggccattacaatgagaatccagagtccagatgatcccacccctggagatgggggctggtcttgcacattgcagactgacgatggcttcctttttccagagccactcgtctgtgggacacttggtgacctcatctacggtagagtcttccgtagccctcacgtggctctccgaggtgtgggtttcttccccgtcgtccgcacacggggaagtggtgtggatgccgctttcagtgggttgcggtgggggccggggcctgtgttcccctcctctgggtgagcaggcacttcggccctttgatgccaccaaggcgtgggttccgttcgggcctttccgctcctgtttggttcctcatgagggtggcggggctgagtgtggagacttggagctttacttcctgctcctgcttttcttgatggcctggtgggaatgagctcggccgtccaggcagcaccgccaccttagccgcagccagccgccctggagtctcacttctgctgttgcgtttttctgctgttgcgtttttctgctgttgcgtttttctgctgttgcgtttttctgctgttgcgtttttctgctgttgcgtttttctgctgttgcgtttttctgctgttgcgtttttctgctgttgcgtttttcttttgttcgaggcagcacacccgtcccaggcacaggccttcattcctctgtggacgtggtcttgtgccgcagaacaaattgtgcgcttaattgaaaagtatataaataaaatctgataaagtgcccagttataggcccctaagtgggttctgtagaaaacggattagaaattgtaattacactgctctccggggccctgccccgccctttctgcggcctggaggtcagggcggggctccctgtcaggtggaggagtttgccaggcactccctggagtccctgaggaggaagcccaggctcttccaggagcctgctccacccctgtggctgtggaggagttcagcaggcccggagcccttcacacccacttctgattagatcagactctgcctctgagatgctgggaggcccctcaggcggcggcaataccaagtaatgcctttagcctcctttgatcagctgtgacgggcgtcctggtctgagactgtgaagcaattggaaatagttctcccactccaggctcagcttggggatctgtggggaaatggcttcctactgcccagctctgcagtttccttgcccagggttggttctttgtctcatgaaatacagttagtacaacactccctccccccggccctgcctggtagcacgtgatagggatcagctctctgcaatttgacttgaatagctcaggacctgaactggtacgttgtgttcttacgagtcaagggagctctcatgattggggtgaaacaagaatatcaacaagagatgggttctgtccaacccagaaatcacagcgagtcgagtattctcccagcttgtctgggcaggagacagggttgggcctgtgcgtgccaagactgccgtgtttttgctgggggtcttgtctgtccctcgtggaggaaataactgctcccttttcttctctctcaggtgtgacgtatgcagccaaaggctactttgacgccctggtgaagatgggggagctggccagcgagagccagggctccaaagaactcggtgagaccccccccccccccccgcctggtagtcgcctgatgccctcaggcagctctggggccctgtcctgtgtccagccgctttttgatttgggatcaggttttgcctgtcaaataggaaaatattttaatgacagtcaccctgggagctgccttgtggggcacaccctgctgaaagtgggtgctgggtccccgtcccctgaggcgtgcagcctggggtgaggacagcaggcaaacccacgtttaaaagtgttcccggcaaattggagcggctgacatgggggtctgtgtgcttggatgatgggattagatggcgtgggaattcattcctggtattaaaatgagtgaaaaaggatgcaagcccacgtgtggtgtggccctgaggaagacaccccagcagcgtgagtgggtggatttcctggagggcaggttatgttattgatgctttgtctgtgtttagcaaattttctgtgatcgctcctgtgacgtctatgtcaagggacacagggtgaaacctggaaattcagggcccacgtggtggtgctgcaggcgtggcttagacggagtccatgcttccacagtcccctcacctagcagggtggtgctgaggtttcctctgcccgcctgggagaccccgggccggctgcctgtgctcacttgctgctcccagagcgagctgtggccggcagagcggcccttgacgcacaaggaagcctgagtcgctggagaaaccacttggattcctcttccctctggtcacggaggacaggctgcgctcactcttgaccgtctccccgtggccgccaatctgggaggtggtctgcaggtctggagaccctcggatggggaagagtcactgtgactggccctgttcccttctttctacttttcttctcggggactgaaagcccccttgactgacagaggccctggctgagtcggcaggcggtgggctggggggtcgtgggttgctctgtgtcacttccagctcccagaagaggctccgtctccctaatgctgaggctctggggctgggaccccaggaacccagctttgcctgtccaggccccgttctctccagttcactcacgacgtcctgcgccgggaggcagacctgccggccgcacttcgcagccccctgcggaccctcatcggagccccccccccacgcccccacaggctgctgccttgggcaggcccgctggcgtgtttgctgcaggtctggtgatgcccgggcggctggagtttctcgaggcaccgctgtgctgacagactggggaggagaggaggaggcactctgggcggggtccccgggcctccgcagactcagcctggaggatgacgtgtgagatgcatggtgttagggtgacggaggctgagactccagtgcaaccaacagcagcctgccttggagctcctgggccctgaccgggtcttcagggtttggagaagggcagaagcagtgggtgtctgtgaaaggggcattttctttttcattagagacagggtcttgctctgtcgcccaggctggaatgcagaactatcgtggctcactgtggccttgaactcatgggctcaagtgatcctcctgcctcagcctccctagtagctgggaccacaggcgtgcgccaccacgcccagctgattttttatttttaattttttgtagagaaaaggtcttactgtgttgcccaggctggtcttgagctcctgggctcaagtgatcttcccaccttagcctcctagactgctgggattataggcgtgagccaccacgcctggctgaaagaggcattgtcttaccataattaaccaggtgttgaggagatgaggtagaggaccaggtgtcttcgccccttggtcgcatgagggtctgcccgtggggaactccaggctcttgtggcccacagtgaggggtgggtgggtccgaaatgggtgggattccagaacttcctgttggcggagtccctggtggttgactgcaagaaggcgctgagcccacatgggcacaaggaggaggagggaagcttcagaagagagggagacgtgagggctcttacttggatcagggagcgtctgtttacctgtggccttttggaatctctccccgggctcctcctggagcgtggagccccgctgtgtgcatctgcagagggccagccacatgtcagccttgctctgggagtcaggttttcttcccggtaacagcttgattgacagaattcacatgccatacagttaccccattagagtgtacagttctgtggcttagtgtatttacagtgtgcaaccattgccccatctaactccaaagcatttttatcaccccaaagcgtttttagcaccccaaaaagaaatcccataccccttaagcagtccctccctcatccccacgctcccagcccctggcagccacaccactgtgtctgtctctccggactggcccattctagacatttcatataaatggagtcatacggtgtgtgaccttctgtgtctgacccttttccctgagcacatgtttaccgtccctctgtgctatagcccgtgtcagggcttcattcctgtttgtggctgaacgatgatccattgcacaggcagacccatttcatttatctggggttgctgtcaccttccggcagctgtgagcctgttttcatctctcctgggcatgcaccgaaactggaattgccgggtcagatggctgggagttgagtttttatgaaagcaacacatccttgtttcaaacaaagtcagccacttcccaccctcctagtgtggccaagtcctactgcacagaggcggctccctcggctgcgtgtctaagagggcaggtttatgccattcctcctcctcctcctctacctccaacagggccgggcgcggtggctcacacctgtaatcctagcacgttgggaggctgaggcaggtggattgcctgaggtcaggagttcgagaccagcctgggcaacatggtgaaacccccatctctactaaaatacaaaaaattagccgggcgtggtggcatgcgcctgtaatcccagctactagggaggctgagacaggagaatcgcttgaacctgggaggcggaggttgcagtgagccgagatggtgccattgcgctccagcctgggagacagagcgagactccgtctcaaaaaaaagtttagacatcatcgaaaggattcttattacggaagatgtggacttagcctttttatgctgtcccttgccccacccagtataattatcacagtatttgtttaaactcatgtacggtgttatctgatgatataaattcttttcatggctaaggcagacggtgtattatgatgactgtttgtacaacttcatcgaggtgtctgagtgtccagtgtgatgagttttgacgtgtgtacacctgtgaagctgtggccacaatcacaatggtgaacttgtccgtctctcgaagagtcctcgggccctccctccccatctccaggcaaccactgatccgctttctgtcactgtaatttagcatgcatttgctggagttttacatacatggaaccatacggcgtgtcttctttttttgtccagcttcctcgggtgtgcgtggttattctgagctgccttcctgctgcgcgcgtcaggaatttgttgcatttcgtcgcttgcagggtcctgttgtgcggaggtgccacagtttggccgtaccctcatctgttgatggacacctgggtgtttttagcttggggcgttcctaaattttcatttccttaattaactgatgttgtggagcatctttttgtgtttttgttcaccactgatctctcttggtgaagtgtgtgttcgaatcttccccctttgtttcacttggcttttgtcttcttaagttacgagagtcctctgtatactctagatggaagtcccttgccaggaatctattttgcacatatttgctttcagtctggtgggcctttcctttttgtaatagtggttttagttttttttgagaccgaatctcactctgtcacccaggctggagtgcaggggtgcaatctcggctcactgccaccttcacctcccaggttcatgcgagtctcctgcctcagcctcccaagtagctggcattataggcaccggccaccacacccgcctaatttttgtatttgtatatttttagtggagatggggtttcaccatgttgtccaggctgctctcaaactcctgctctcaagtgatctgcctgcctcggcctcccagagtgctgagattacaggcatgagccatcgcacccagatctgtaatagtgtttttagaacaaaagtatttaattttaatgtagttcaatggactgattttttttttttttggtattacagttttttggtattatagctcatggatttttgttattatgactctgtggtatttattatgacgcctttgcttttctggagttaataatggtctcgcgtcttggttcgcttcattttcaatgcgccatcacgaatttctccccacagcctcagctgcacccttgcactggctttgctgttggctgggaggtcagtctctgtttcttctccttttggagcctccctgctccctcgtgggctgctcggccgtgcagagtcagcttctcctcctcccgggtcagagccccgtgttttctgggtcctgtgtctttactgttcctgtattactcccaccatttggggaattgtctttttctttccttttttttttttttttcggttaggtttctgagtgggtgaacggggaatgtgtttgagccagtacgtgtctgccattgtctctgctggtggcttagctggtttggagtttgcaggtggaagatgctctgtgttcagagtctgagggcctcacaccgtcgtcttccagctcccaccgctgctgtgttcagggccaccttggtgctgattttatgtgagtgttacttcccccccgcccccccgccgcccccaccagctctggagatgtttgtgctggggtgttaggaatttcctgccgatatctttcctgtggtggcaggtcctgagaggcttgtgaacagcatcactccatgattgagagtggtgtgcagcctccagggcccacaggagcggggacctgagcgaggaggactgcaggggttaagaggaggggtgaaggagaggggcaaagggtgtgtccaaaggtgtgaggtggacagaaacaagaggcttttgcagaaatgtgaaaggtctggagcgtatgagggggtgaggctgggaggggaggcagggctttgaggagcccagggccttgtagagattccaggcttggtgccacaggaagatggatttgtgcaacctgcctttctcactgtgtcttagggtccatctgtcatctgtgttcttgccacacgcggatgccttcgttttcactgctgtagaatattccataaacgtgtaacagtttctctgtcctcctcggtgagcagttgagttacccctggtgagtttttctggatgagctcgaggcccaaggggccctgaggctgagctctcctgcgggatgaattccacaaggccccgtggggttgtgcggcagccacttgggcagtaagtgaaggaggcgttcgtctcactccccaggccgggggctcagcagttgccctgggagttttgctttctgtgtttgcaggctgtgttattaagtgcgtgtgtgtgggtgtgccttcctgagctgagccctattatcgcaaggtggcttgctctggccctgaacagtcttatttttggttcgtttggttgggtgttgagtttgtttcctgttcttcctcttcagccccggggacgttgctcatttctggtcaccttctcctccagctgtccttgctgccccaggatgggaggatggaaggtgctgtccctgctctctgggaatgagccaggccctcagtgggtggagcccctcccaggaaggcagagccctggtctgtgctggggtggaggtgctcagctcagaccagccccttgcttggccgggaggtggttttcagtgatttggtcctgacacccggccgagcagggccccagcctgtcctctctctgctggcctcccacccgggcccctctgggtgtggccttgtggccatatggggccagggttgccaggcaagcagtggtgccaaccctggctgcccttcttcctcctcttctcattccttccccactttcattcttcgcaccttttctttcccatgtggcacctgctctactcacagggcagtctgcctttagtcctgtgggtctctctgtacctgcacctctggccctgtagtgcccacagccggggaggtggcctcgggctatgtagccctcacggggaggtcctgtcttcagccccgtcaggatgacgaggattcggctgcactgactcccggctaatcactgtggatgatgctgcccgctccccctttccctgcagagccctgagctctgttcttcctgggaagagtgagggtcctggcagcaccccctcactgtagccaagcgtgctgctccaagtgagccccaggtctccggagccgggagccagccttggcctgcgtgagctttcatgcttctgaaccagagcctggcccaggggtgaaagcccagagagtctttttttgctttaaatgagcagctggggctgcccctttgttctctctcctggagtgaggagtggctgggtcagagccggcctttggtgatgtgggtctttctgtacctgtggctctggccgtctggcacacagctggggaggcagcctcgggctttgtggcctgcagacctcacagacggaagggcctcccgtcttcagtcagagactgttttttccctgcagtgaaagagtttctgcagttaactctcagggctttgctttgatatggcaagcgcttagtcagggaatggagtggcagctccaagttccggaagcttctcacagcccttctaatcccctagccggcagccacccacacttggctgtctgctggctgactggttttccaatccccgccatggtgtttctcccttccagctccggcaggcgtgattccggggcacacccactgctctcaaagcccctgagccagtgcctgggttagacttttcccaggggcgtctgctcctcatcctcttgggctttgtgcttgggttgactggcagctcggggagactggagtggccggctggatctgagtcctgtaggccagtcctggcatgtgtagacactcagtgtccctgtggcccaggagcaagcctggcaggtgacccgagggagggcgggcccagcctggtcacagaagcagtgctgtgcccgtcccggccccctgcaggggtccagggtcctgagctgagagcctcaggaatctggggaatttgctaagatgtgtgagtggctcctcctctgttttgggcacctccctggaggctggcaccaccaggggctggtgtggagacccaagggtggagggcagggcaggtgctcaccatgccgctgggccgtgtgggtgcctgggtggacgtggcactggttctttgtgcgggtggaggacagctgtccagtctgcctcaccgacagctgtggtttgcagtgtcctgtgactgcactcctgagcacacccctccacccccttgctgctgacagctgcctatggcccaggccctctcgctcccccacccgaggctgggcgcacagagctgggctgagcctgggtctatgctggccaacgggagaggcagatgggaggagcaggccagagtcccagtgacctggggtcctggtacaacgtgtacacctgggcaggtggctctagcactgtgtgccagaaccgtctgtatgaaaagagggtcacgtagctgccctttggcctggctgtgcagggaggctaaggtctaatcaccctgtagagagttgtcggctcttcaggacggtgccctgtcttcagtgaggggggctgtcattgcagtgagcggggccgcagccctccccagcagagagcactgcacttcctttgtgtggtcagacccgcatgtccagcctgtctatctggggccctgagcctgttgtgtttcttgtccaactgctctgtggccctgccacggaacacctgagccaggctgttttgctcagccctttcccatctctggaggcctctggtgtgtttttgtcctttgaagaggccgctgtgtacccgctggtgcccacagcatgcttgtttgtgatcacagggcgtgtgtgtacctgctgggcgcactgggcctgtcctctgccagctgcccggcatccccaggtgcccgggagagtggcaggagctccctgttgggccagcctcagaatgaggatgttagctggcagggggcattgtccctgcctgaaactgtgggctggattttggtcactgagtcactgaattaaggtgtggcctggaaacttcccatagctgttggctgcagtgcacgcctcgttgtccagagtgaggcaggtgttctgaatgcccacctgggagagctggggcctggggcccccacaggtcaggtggtgcccctcctgtccccgcaggtgtcggcctccctcttagaggcactgagtggctccctccgtgtgtgcggcatctctgcgtctctgaaacgtggggccctgtgcagaagggaaggtccttggtcatgtgaaccccaaggggacttcggggctgtccccagtggctcccgttggccaaagtggctcggaagcaccatctcatgtcactcacctggtagggcctcctgctctctgtgaggccaggctgtgtcacggcccctctgggctcaggcggctccatgcacagtgcacccaggggcccatgtgtcccagcctcctcctgcaggtggaggccgcagcctccctttgggccagtgactgtgacagcagtgtatgggcatgacacctgctttcaggccctcacggcagggccttgccttgtaggctgccaagtcttcctgacagacaccatttgaaggccttaattagatcaaccttacatccccgagggggcctgacacggaggtccctggttggtcccggacctccagcacagcggcgcctgcagatgagagggaagcgagatgcccctggcccaagcccagcctgggggcttcccttccagagcccaaccgcttgctccgacctgcctgtacctcccttcccccccacactattcctccctccctacagtaggactccggcaggggtgctccagagacagccacctgaagaagccaccaggatgcttgggaaggacgctgccctgggccctgcctcccgccccatggggatctttcaggcccccaccgcctgttcgcagaggcgcgtgctcctgctgaactctgtggggaccctccagcacctgagcaggggaagggggcgggggggcctcatggtgggcgggtggagggccttgttcccctctggctgtggctggggatggcccagccctgcccgcctgccaacagctttgcggtgcaggctgagctctgcagggagattagcagccgtcctgattggattggccgtgttgcagccgcggcagccaagtgtgggcccctggtctggctgctcgtggtttgatcctgagccgtttcctgctggtgatcagtagctccgagcgtcacccacagaggggctgctggagtctcactcagcaagaggctctgaggcccggccaggtgtcctctgccggcgttgctgctgctccctttggcccagcatcgcagcggggaggcaccctccctgagcgctcacgccacagcgtcaggcctcagccggccagagcagggaggacagctggtctctcccctgagatgccggggctgcctgtcccccggttggggcacagctgatggcacctgccgtccctcggtactgtcaccagtgctccctagggagggaaagagaggagccgctcagccttcctcctcaagccaggagctgctgaggtgctggctgcctccgatgtggccccacacagtgttggccgcaggccgaggggcctgggggcacaggtgccggctcaggagcctctgtgggcaggtgtctgcatctctggggtcctgggggacgtgggtcccatgcactttgggtggtgccagttggcagaagggtgggcacgtcaggcctggcagacactggtcgcagccacgcagggagatgacggccggtgctctcagggcggcctctgctcctgtttgcatcttgtagggtttggagcgagtcagtggctgagaaactctctcccaggagcaatgttccctcctggtcaataatcagtgagcacagataggcgaggctggttaggagcagaccacgcccatggcaggggtctccccctcgggcacgcgtgaggaactggaggtctgaatggcttctgtcccctgcagagcagctgtctgagggggtctgtccccggaggccaggaccctggtcagtgccatccgggtcacgggtgttcttttggccccagctgtaggagggcagcgatgcagggcccaaaccagaagccgctcctgaatccctgaccccaggatcagtgtgaaacaaagcccacgacccaaggaccccgcagtcagcagccgcacagacggagccagcactggagcccgtctcaggtggctccgctcttgtgtcccctgtccccgcttccctgccctggggagggtgcccccaagcctggtactgcagagaaggccacctcggtggctccttggttgtgacatgaagtcctgcgggagggcctggggggactccggtcccagggaggtgtctttctcaggatggggggccatatctggttgccagtgtctctgtccagccttgcgttcctggctgtgggaggtgccagtgggttcccttgcccacagtgtctgtgaccgttgtcccagacatgctcctgtgtgcccgctgccgagctccagctgctccaggctcctccactccccagtcacacatttgacgacttgtctggcactgggccccgtagaaacagacaggacagggtctcagcagccccaggggtgatcccggtggcaggggctgggcttagaaggatgcgctgggtcctccggctgtccccactgtgcttgtttgtttaaacgtctgaagggcaaacggcagagcatcaacttctggtagctccgaatggtgggtccacgggcattcgtgacggtctcctaggtacagtttatacattggaagcatttttgtaattgttaccagcagtcacatgcaggcggtcacatcactgcagggccaactggactgtgtcccgggcagagactgaacacgtgcacacacccagccagagcacgcacgcgggcacagatagtcctggatccaagtaccgaggggcggcgctcatgccatctccatggagtgctggaggggtgacagggagagtggcccctggcaaggtggtcagagaggctggggagtggtccacggggcggccggtctgaactgcccacctggcttctcggcggcccccgctcatgccatgggactctgggcagctggggtccagggctggcttcaaggacgcctgctgggagttctcgagtctgttccctgcctctgcagtagccccttccttttcgggaggtgtagtctgcgaggcccctggaaaagcctggcggggggcgtggttctccatccatggcagctccctctgcccactcgggggactctcccccgccaggactgtccactcacgagctcagtctggccagtacgttcctaggcaaggttcagttcgcctcccagccttcctcggtggacacctctggtctcgccggtcacgtgggagccatgcccagggcaccttgggaggatgctgtgccgtgggacctgaacaggcagcagaggtgaccagggtctttggagatgcacttgttgtacccaggaagattggagggttttttgttttcttggttttttgttgttgttgttgtcttttccccctttttggagacagagtctcactctgtcactcaggctagagtgtggtggcgcagtcatacatagctcattgcagcctcctgggctcaagcgatcctcccacctcagcttctgagtagccaggactacaggtgtgtgctgtcacgcctgtatactttctaaactttttgtagagacaagagcttgctttgttgcccaggctggtctcgaactcctggactcaagtgatcctcctatctcggcctcccaaagtgctgggattacaggcgcgagccaccgtgcctggccagaggttggtcttgcaaggcaaatttgcccatgaagaaaggaacaggccctgctccaagctgtggcctgggtctgccctccacactgagcggacgtccaggcagccttcgggctgggtattgaatgtgctctgccgggcaaccttggtcacttgtggccaaaagggaggtggaaatgtggaaagaaacccctctgccccgtcagaccttaaacctccttgcggacactgggcaaaggaagaggcaaaaggtgctttggagggaggagagaggcacagggagggttgctgcagaggggttcctagtggacgcgggggcaggagaaggccctggcgtgcctgtcccgctgcagctgtgggagctgggcttggccaggtcgctcaacccgtggggagaaggtgtcgggttagctcagcccccgcagagcctcatctccacccctgtgtgtcacgtaggggccctctgcagcctccactccagccaccccgggtggatggccgctgacccgggagcccccgtctgcctgggacgctgggagtgtgtgagcagatttggtgccagaggcccgggcaggcctgagggtccttgatcccagcgtgatggtgcgttgctggtccagggcccatccttggagccggcgggttggagtggtggctcaggacagtgggggtggatgacagaaggcagcctcggcctctgctctccctccacccccatgtccaagatctgaatgctgacccagccttgacaccaaggtggctctttggacttgcttggtttcagaactgtgtgtggggaagcagcgtcagctaccgtcatcaccatggcaacacagacattgattttttttttttcccccattggttacccgctggccacattccatttttgccttttttgtaggtgggagaagaactctgcttctcccaaggagaagctggtggctggagggcagcagagagaaggggcgggattgggagtcacccccgaggtggcgtccttgggctttgggtcagcactggatctggtcccctggcccctgtgggggctctgatagcaagatgtcctgtcagccccctggccatctgtccttccccgtgatgagggcgctctgttcgagccctgcccaggtgggtggtgatgagctctcgaggtgcctttgggctctggaagccaccaggataattgagagttgtggatagctacttcagaaggctctggaaggtgatgcatgctcacagccagcttggagcagctgacctctcgcacagagcccctcttccaccagcagagaaaggagaagagttccagtgcctccggaagcaacagaaatatccaggaaacgagtgtttctgtgccctcagtgtccactggccaaaaagagcaccctgaccactcggtagcagcgcccgtccgtccctgagcctctgtttgagggactcacgtccagctcccggcagactcagcgcgggggtcggatgccttctccgcaccatcccgcaccgccacgagctgctgtggctcacattctgccatccgagctctgtccaggaggcagccgagaattggagcagttcccacgccaagtagggccttgtgggtggccggtcccctcctccagcgtggcacggaggcgccggagcatgcaggtctatgcctctgcagagtctggggcatcttgttccatttccttgctgcctctcctctcgtccgtgatcatccccccctccccctctgcttccggcctccccggccttcccagtctcttgggccatcatcgtggttgtgttggtcctgttgctcctccttcgagcgcccacgtagggctggggttccctgcgggctgtgggtgccgtgccctccccggctggctccagccctcagaagcttggggagggtgggctgggccatctgcattccacctgcccaagggctgccactcccttttcccagatggctggagtgccccagggcagcgttgggagacctgcgcaggccccacctcagtccacaacaatgttccttgattccctccggcttcctgctccttcacctcctcctgcgcagcccggcctgacccatgtaatcagggaacaggaggggctctcctcagtgtccctatgtccatgccttgtggccacctgagcacttctcagggtccagtggaaaactctcctgccctgtttgacgcccacactcgtcagtttcaccttggtgccaagagcagacgatctgctccaggccccacttgggccacagcctcacagccgtctccacgtccccacccgaacctggcatttcctgaattcctggcccctgtccgagaaggaggctaaccctcctgggagagctctggcaggtgctgacccaagtccgtggggtcttcaacctttgcagacacctgcgcccagaggccacgcctcccactctgagcacaggcgggcggacgctgtctggcaggctctgcctttctttcatttttcctgacctcttcgcccagcgtcctctgcttggaggtgggtgtatgagaaggggccattggtgtcagagtggggctgtctgctgagcaggtgaacacacccccagtccttgctctggggccgggctgtcccgtgggcctcacggacctcattgtctgtggtcatgagcctgcatcttactgatttaatcccgggtgccgggtacaaacatgcacgcttccctgatgagaaaatggcatctggcctggagccccttcccacagccctgggtattgggtgcctgtcacctccaggatgacccccagccagcagacaggtagcaggtggagggtacctgctctggggccctggtggccccagtgggttgaagctctcttcgtaggtggcgtggggccttctgtccccatgaccctccagcggcccctccccatgccagggctcagcacccctgctcctcagagatcgaagcctccttctcggaccttccccaccactgtggtcccagcttcctgtgcagtctcttggttacccaggagttcagaacttttaccacctggggtgcctttcagatactcggacctcttggtttgtaggagtaccaggccggggtggggaggtggaggctgtgctgctcccctcaccctgggctcagccagggccgccagccttcttcctgggagcagtcaccaagctggtctcgggccgtgctttggtagaaatgatcttttaactgactaagcagagtgttaactgaaatcatcatgaaatgctgtttatgctccatttgggattcggagtcaagcatttggggaccctcgggcagggtctgagctgctgtttgccctcgcagatgaggacgacgatctgcacagatctgcctccaaccctgggctgagagcatccgaggcccaggctcttccctcccccagtctttttcactgtctctgagattcacgctctctctcaggttcttgtcactcgcagactataagaacacgttgtattttctggagtaaaaaaaggcacaaatctttaaaatgtcactgttgtgaaagccgaagtgtgaggggctcttctaggttaaaggactaaagatgcccagcgccccagaggaagggtgagagtcctctgggagctggcaggcgccagttccttgtcgctcacggttaagcccgtgtatcacttatttgtctcaagtgcttatggagcagtcttccaataggtggaatgctgatttgttttcctaaaatgagagagactaaagccacgtgccaacgcaacacagcgggacccttgatgagaacctggatcagggaggagcttgtcaatggcatcgtcgggccattcaggagcatggtgtgtgctgttgatgagaggaggatgcgtctgtggtaaccttcctgtgtgtcacaatggaggcgtgatgaggcagagaaggtccttgctcttaggacacagctgcagtattgggggcaggggcagcatcacattgtctgatgtctgcagttgagtctcaaggggctgaaaaaagtgcctgtgtgtctgtgtgcatgcatggatacgtgtgagtgccggtgtgtgtgcatgcacggatacgtgtgagtgtgcgtgcactggtacatgtgtcactgtgtgtgcgtgcacggatacgtgagtgctggtgtgcgtgcatggatgcgtgtgagtacgtgtgtgtatgcacaaatacatgtgagtgccagtgtgtgtgcatgcacggatacatgtgaatgcctgtgtctgtgcgtgcatggatgcgtacgagttgcctgtgtgtgtgcacgtgcacagatgtgtgagtgcctgttcgtgtgcgtgcatggatgtgtgagtgcctgtgtgtgcgtgcacggatgcgtgagtgcctgtgtgcgtgcacggatgcgttgagtgcctctgtgtctgcgtgcacggatgcgtatgagtgcctgtgtgtgtgcatgcacggatgcgtgtctgtgcgtctgtgtgcgtgcacagatgcgtgtgagtgcctgtgtgtgtgcacggatgcataagtgcctgtgtgtctgtgtgcatgtacggatgcgtgtgagtgcatgtgggtgtacctatacatcacagaaagagtggtgaagcgattgtggcaaagcacaccgccagggaacctcggcgaagtgaatgggtgtttgctctgctatccctgcaacttctctccaggttggaaaggttgggctgggaagagaataatgtagttctgttttctaaaccacagggaagaatgggcttggcaaagccatgactgacagtgctttctgtctccttcaccttcccactgtgttgagccagagccattcgtgggaacccctgggtgtggttgtgaagccagcctcggctcagctcacccacagagctgtctccagccacatttgcattccggctgtgcccacatttggcattgggggaaacttcctggtgcctgtgatttcaagccggcggccaggtctgcgcctgtgctgggtctggggcatcttgtggcacttccttgctgccctctctcttccgggaccatcctcacctccctccccatcccttcccctgtgcttctggtctccccagccctcccagtctcctgggctcagcagatgaccacccagggcatccccggtttggcctcaatctttgaatcgtgtgaagcgatcggaaggagctcggccgtcgcctcaagtgggccgccttccggtgggctcccttcctgtgggccgcttgcatgccgtgctgtcttcagggatgagcagttaatccttctcgttcatctgctcactagacgcggctgtgtcagagcagtgcctgcctccttgtggccctaaccttgtggggtgctcctttgagagcgtcctgagtgaccctctccaaggaccctacctccacctgtccaccagccctccttgcctttaaccctttcagtgctacgcgtatcaccacactccctctgtgcccttctcccccaggtaggggccacttagaacactatggcagcctttggtgggcctcaagtcctgctcctcccctccgtgggcacattggggcccccagtactgcccagcctttgcactggccagccacaggctccatatgaggccagctgggcactgccatctctgtcctggcacggaggttctgccagggtctgtgtatacttttttgggtctgctgggaattttttttttttttttgtagtggtgatgaataaaatgcataacgcagagaagcagaagtgcctgcacccgggtgttccctcttgctagtaatcctgaggtttggtagaagccagctcctgctggggtcaggggcagtgaggcaggggctccccagagtacagcctgagaggcctggctgcttggctggggggagtgccgagtctcaggtcctgccgggaggcacagtccttccagaatcaatccctgttaccatctgcagcttaactcattttaagcttaaccatctgcagcttaactcattcttgctttatcttccctgtggaccaggtctagcctggggcagacaggagatggcagatggacacctgggaggggctcactgagctccgcctctccatcaacggaggccccgtctaggttgtggaggatgcttgagagagccctgatgttctgacctcccaaaaggtcaagggtgctggcagccggtgagacgccgcagtttgctctgctccccggggctgtgcttgccaggagacatttcggctataagcaggcgagaatacctccagaacacacatcaggaagacagatggtgtgcaggtggggctcagggctgtcatcccctgaagctgcttctgaaagagctgttcttgcagcagcactgttacaaaaggccacatgggaaacagcccgcacctctcagtggatgccggcagaaacgcctcgtgtatccatagggtgaagttgtattcaaccacaaaggacaggctgggtgtggctcatacctgtaatcccagcactttgggagtccacttgatcccaggagttcaagaccagcctgggcaacatagtgagaccccatgtctacaaaagtatcttaaaaatgatctgggcatggtggcacacccctgtagtcccagctcctcgagaggctggggccggaggatccctcgaacccaggagttggaggcagcagtgagccatgattgtggcacttcactccagcctggtgacagagtgagacccctggctctaaaaagacaagaaggagactctgaggcaggctgcaccatggatggagcttgaagacattgtgcccagggagaaaagccaaatgtagagggtcatgtgtgattgcagtgattgaagtgttgggaataggccgctccacagagatgccgtgagactggttcccggagctagggggcaactcctggtgggcgtgggtttctcttcggggtgatgaaagtgtccgggcagtcagctagctcaactggtgagcgcatgatgctgacgatgccacagttgtggactcgatccccacaccggccacagtcccaatttcttagccgggcatggcagctcacgcctgtaatcccagcactttgggaggacggggtgggtggatcacctgaggtcaggagtttgagaccagcctggccaacacggtgaaacccccgtccctgctaaaaatacaaaaattagctgggcgtggtggcgcacatctgcagtcccagctactcgggaggctgaggcaggataatcacttgaacccgggaggcggaggttgcagtgagccgagatagtgccactgtacttcagcctgggtgacagagactctgtctcaaaaaaaaaaaaaagtaaaaatggtgaattttatgttatgtgaatttttctcaattttaaaaaaagagcctaatgctgggaggacggatgcttgggcttcccgcccgtcctgaggctggtggtgctgagtatgcgggtggctgtgggagcgggtgccgtctcaggtgcgagccagacaccgtgggtgcgggtgcaggtgtgggtaccgttttgggtgggagccgggcgctgtgggtgcaggttccacctcggagctgggtgctgtgggcacaggtgcgggtgccatcttgggtgggagccaggcactgtgggtgccagtgccatcttagatctgggcactctgggtgcaggtgccatctcggagctggatgctgtgggtgcgggtgccgtattgggtgggagccggacgctgtgggtgcaggttccacctcggagctgggtgctgtgggcacaggtgcgggtgccatcttgggtgggagccaggcactgtgggtgccagtgccatcttagatctgggcactctgggtgccggtgcgggtgtcgtcttgggtgggagccgggcactgtgggtgcaggtgccatctcggagctggatgctgtgggtgcgggtgccgtattgggtgggagccggatgctgtgggtgcaggttccacctcggagctgggtgctgtgggtacgggtgccgtattgggtgggagccaggcgctgtgggtgcaggttccacctcggagctggatgcagtgggtgcgggtgccgtattgggtgggagccgggcgctgtgggtgcaggttccacctcggagctgggtgctgtgggtgcgggtgccgtattgggtgggagccgggcgctgtgggtgcaggtgccatctcggagctgggtgctatgggtgcgggtgccgtattgggtgggagccgggcgctgtgggtgcaggtgccatctcggagctgggtgctgtggtgcgggtgccgtattgggtgggagccgggcgctgtgggtgcaggtgccatctccgagctgggtgctgtgggtgcgggtgccgtattgggtgggagccgggctctgtgggtgcaggtgccatctccgagctgggtgctgtgggtgcgggtgctgtctcgggtgggagctgggcgtgtttgcggctgttggtgtcatctcgggtgggagctgggcgtctgccttcctgtactgcagcctccgctcctctctggctgtgctctctgctgctccaggctggcagcagatcttgaggatgcagcctctggaagctctcagggctcctgagttttggggtgtttgacctccagcctgctcagccccgagtcacctttgagctgtgggggtgtcaggtctctcccctgcaaagtggggtgatagtcccatgctggttggggtaagacctggggggagtgagaccaggctcagcctgcaggagagatggagggcagttgtggggtctcaccgatctctgctgggattccagaaaggagctggggactcagcagatggaaagggccctctccgccaggtgctgcgcccaagcagaaccaacccgaggacagaaagatgctggccgggcatgcctggggcctgggttcctcagcctcacctgactcaggtgctgttttccttgctggggagcaggggcccagccggggtcttgaggcagccctgtccccatcagctgcgctcagacctgtccacaggaggctgggctccctggtcacaggcagtcccgtggagcgggtttcactcttagcctggcgaccgccccgtctgaggtggaggtagagctggtggggtgaggcccacggtgaccccagtgtggaccggctgctgcttcactcatcacggtgcattggtaggtggttgaaaagagagaggcctcgttttcaggatgactgtgtagacacatcacccgtgacacccatgtgtgccccctttctagccctccgatgctcctcctcctcctcactccccagcatccctaggcagccctgggctggtggggtgagctgcccagagttggctgacccatcagcctgggtgcaacgctgctgcactcccacacctacatcctgaggcgtggccacctgctttccatcacccccaacaccccagatccccggatccttctgatggcgacggctctgccggtctgttctggctcatgtgctgtgtgccctggcccgctggcactcagcttacatttgaacctcgtctttagagttaaggtcccacctgtgctgtggaccagacgtgggcctcccagtgagtggggggcatctgataggtgaggctgcttaggaagcctggcacaccctgtccctcagcagggtgggcctgggtaagtctgcccgccgcatgggagggagtgtggagagatgaagagatgagggagcccgagaacgcatggcctcacgtctcaccccaagggaggctctcaacggctgtggagccctcgctactccgtcttcaggcccctgaaggacacaggcaaccgcggacaagacttagttgctcagcggaactcactgcccctaccggtgcctctcactgctgatcttagggtcttggcattccttaggggcctggtgctccatgtgccccgtccttccagctggcacctcgggggttaagcgctggtggctgcacacactcatgctcccggctggggcgcctgcggcaccctgggggttaagtgctggtggccggacacattcacactccatgcccacgtggtttcctgcagctgcctgtaaggtgcagtttaaaaattcaaggcatgggatgattttgtgcagccgccgctcgaagctcagggcgggcacacgcctggtctgtgcagctttgcctggacctcccctgtgtgtgcgccagccgcacattgtggggctgggggctcgggctggcggggatgctggggtgcacatttgagtgctgcagctgcacgggcgggtggtgatgaccgtcacctggccagaaccccctgagaagctccacatactctttttctttttggattcagcagtccctttttcaaaggatttgttgttggctgttgtcttccagatgttcctcttgactccattgtgtgtagccttttaggggaacacgtgcttgttatctggtcttgacattcacttataatttggggctgcagaatgtggcgggaaccaggcacggtgctgcatgcctttgctcccagctacttgggaggctgaggtgggaggatcacagaaacctaggagttggagaccagcctgggtgacatagtgagaccccatctcaaaaaataaaaaaaatgggatatggcaagagccgtgaagagttcagctgagttgtcttgggccttttgcttcacctctttgtgaacttgctggcccccacgccaggatagggggccggcgacctcgcaaaggctgggtgcgtgtggacactccggggctgagggagcactggccagggcacaggcttgggtgggttccccctctcaggccagaccttgtgcctgttgtcacctgccaccccaactcggctgaagccagttcccagtgtccaaggggcccgagagctgggaggtggatccaggatcctcagtcacaggaacaccatgaaaaccgcaggacagttccctggaggcttcctgagcccagaggtcgtggtgtccatcctgggaatttataggatgccaaagaacgccgagaagcacgaggagccctggagctgcctcccccggggtcccaccgtctcaggcttcctgatcctgctcctcagcacagggcagtctgcccccggcctgaagcttcctgcgtctgctgtccttggctcgtaggatggtgtcctgccaggctggcagcatcttggccacccagggtggatggtggaggggccacgtggctgtgggcctgtgccagccctagctggggttccctctcttgtggggtctgtgctgctggccgtgctcccgtctcctcccctgccctgggcagcgcctgctcacgtccaagtggcttcccttcagccaggctcctttataccaaattctgtcctctttgtccttgatcccttccctgcacaccttgaaccctaggtcgagtgagcctggggtagggcccatgtcctctcctgccgaggctggtaaaccttagacttgcccccaccccacccgtctgtgtggtttgccgctgatccccagaggtctcgacttcatcccgaccgtgagaggccaccgcagtggtgcagctccctcctgaccgcagtgcagccccagggggccatcgctgggccctgccccactccacagggccacacagcagggaccaggcagtcacacccatggttggagccggtggaagtgatttccaggcaggggcaggcccctgggccagggctggggctggcatccgtggaggtactgggtgtgccagggcgcgtcttaggtggtttgtgtgtggcagggcctgggctctggggtctgtgtctgcctgtcctgctccctcctggccccggggccagcgtggtcctggagactgatccagcatgacctacctgtcgtccccgtgagccctgtggttgtggccagagtgggtagcggcatccagggcggctgtgagagtggagggagactcgggtcacggccaggcacacacagccacacacacatgctcacccgcataagcacacccgtgtacggttcacgcttgtgcgtgcccactcacataggtagacatgcacgcacatatgtgctcatgcccgcacacatatgtgatacctccccggggtctgcagtgctgctttcctcacgctgaatccctcttcacggtggccaggcccaggcatgtcatcttcgcaggcagagggtgagcaactgtgtgccaggcagcccttccgtatcttcccagaaagggaagccaagcccggggctctgtgcgtcccccacccctgccctgcggtggatgggatcctgccagccctgggcactgttctctggagaagcagccaggcctagcactacttttagcgggacacgtgtcacaggagccaggtgactgtcacctctgggtcccctcaggggtgcatgaatccctttcctcttctccctccacagaaatctgtgcccctgacacggagcgttcggctttgggaacaggcctagcagttgccagcatgagggcgggaatgacttgggagtctgggtggccaggaggtgcctgagatgcctgggatagctcgagaggcagccctgtgtgtgctgacccgggaggagggcatggctgtgaggtggaggctggcacaggcggttgggccctggctttgcggccactcaccagccgctgacgtggcctactctgtctgctcatctgggcggccttgtgggttgtgctgattaaagggaggtacatctgtgaagcacctggccctggtcagtgctcagagggtctgtggtcatggtgagaagaaccccgcagctcctggaagggcgagaggacccggagaggcttcctctgccagactcagctgtgctttgaggaggggaagtgacccaaggccagcccagccgtggtcctgggaggcagcatcgcccggttagggcttcctgcgtgtcaccgggggccttgctctggtttctggctgaacttgttgggcactgggcgatcctagtgggggttctgctcgctggagcgagaggaccctctggggcgtgggaccggcggtggcctggacgtcagcagaggaggaaagtcctgcttcaggcagccattcagggagggacaggaatcacccgagagtgacctgccagcagcaggggcggccctcctgctctgtttgtgtccgcagcacgtggtcagtgcctggcactggaaacagtagctcagcaaatatttgtccgtcaaaggagtacgggggccggaccacccagttccggcccctcctctgcagaccaggaaatggagccatttgccgcaggggtgggtctctcgtaccaactccagggttagcgggaggacagccctgaggggctgtggcatgcttctgtcccatgtggtgctgatggggggtgggtctcgggctctgctgatgagtatcagggctgggtcctggaacccaggctggctgcactctgggggcgcttctggggacggctagccagccccctgggctgatggtgtggtcgcacctgctggccttggcggtcatgtctcaaatgggatcacagctccgagggagctttggcagaggaaggtgggaaacatctgggtgaaaaggaagtgggccgtgctcctgtgtcttcgaggcctcggcccctcagctcctctctctgtgcccctctctttggtggaagcaggtagggatgcagcaatgtggtgaggcccttacagagtgggggactcagacccacatcagggtagcccagacacctgcgcccctggggctgcccccccgcaggtggacttgagccgggtctcgttgatgtccaggctgcaaaaggcctctgacggcgcttaccctgtgccgccacgattttgatttcttaatctgcattttgcacacgggccgaggagacatcagtgtccccaagcgctgcccgtgtgtccccagggccctcagcgatggcaaggcgagcccaggccagcgtgcaccagggtggctgcctggtgagcctatcccatggggccaggtctcctcagaccaccgcgctcctctggggctcaaagcggagatgttgggtgaaggtctcagaggtgctgtgggtctgcagcctgggtagtgaggtgtcttggagtcagagaggcttgtgaccagcgtgtgcccatgggtgtcccccagaggaggtttgtgcgctgtggtgtggggtcagcagactgtccacctggcctgaggtaggaggttcggagctcttgggtctctgcgaacgacagccggatgcgtatgaggacgcgtgtttgcgctcactgtcactcactgtcacgcctggggtgaagcacacacgggctcttcctgtctctcgcctttgcagagactcaagttccctcccaaagatgccaggcgtgctgtgcatttgaggtctggagtcccttctcattctagaattttctgtttccttttggtgtcccctctccgccctcccttctggccctgacaccccgggggccctgctgcctgtggtcacagggcttccctgggtggctgtcagcccagagtgggatgacggtggtgactgcgagcacctgactccctccccttccttctgctgttctgcttcccaggagacgttctcttccagatggctgaagtccacaggcagatccagaatcagctggaagaaatggtgagtccacccccagcgtggccctgcgaggaggggcaggtgcgacgggagagctggcgccacaccttggccgtgtgtccacttgggaacagtcccagttgtccagccacactcggaggcagggagggaccctggctcagcacacaagccacactcgaaggaggacgtcggagaaaagggcacaggccagaccgcggccgcatgtttcactggctgcagtggcagccatgacacgctgggctccagggagagtcctgatcgcagccccagccagaccccactcctggggttcacaaggttgcaaggcacacttcccctggcctctccgactgtaggcagaggcagaccccacacaaccagagcacgttgctggcggctggtttgcagcatcctgtctaaagccaggggtctgaccctggtgtcagttcaggcccatgggccctgcgacctctcagcctgtgtcgcagtgatccccagcatgggacagcagaggaaggaggggatggccgtttgtttcccttgtggctgtttggaggcgagattgtccgacgttccagactcctgttcagcactcgctcctggctccagagggtgcacacgggcatgcggggccacagctcatcagtcagggggagggggcccctcctgcacagccgggacacccggtgtctcgtgcccatccgctctagccctgccctgcctcctgttccgggtccatgtgttggagctgacggctgatgtgttttctctccatgtccagctgaagtcttttcacaacgagctgcttacgcagctggagcagaaggtggagctggactccaggtatctgagtgtaagtgcaccctggccgtgcctgctgggccctgtgcctgggctccggctctcccaaatgcctgccactccttcctcggcctgaaggcttcccacttccccgagctccccgtccacatgggccccagctctgactttattgtccatttgggaccgagtgcccctggtgtgccccaaatgcaacctgtgggtgaatccgttgcctctgacgccccacatgcctggttccatgccccggctttggccacttgcggtgaagctggtgcctgactctgctgccggggagtgcaggagctccttctctggcctctgcagttccctgggctctcggcccgtcctgccccaccgccactcctgtccgctggcaggaaggcttggggctgaggcactgcttgagggtttgagggtcacctctggctctcagtggtgggcgggaggggtgggcctcggccactttttccaagtgtgattttcatcttgggcgaccagagagctgctatggggttgggtggggtcgggctgaggcttcatttgggctctccccaactctgatttgcagctgagcatgcacggccagagagcgagccaggaagggagtggcagggctggcaaggggaccccgttgcgttgggctcatgggcctcggttttgctgccagtggtccgcgctgcgttgggttcatgggccttggttttgtgttttattgtttgaatctcaggctgcgctgaagaaataccagactgagcaaaggagcaaaggcgacgccctggacaagtgtcaggctgagctgaagaagcttcggaagaagagccagggcagcaagaatcctcagaagtactcggacaaggagctgcaggtaggcccgccacccccgctgtggtgcctctcctgccaccttgggactgctcacccctcggcccccctcgtccacagggagtggacagcagccccccaggtgcgatcagacagaggcaggctgtgtgtccctggtagacctcgggagcggtgggcctgacgcccccaggccggtgggatggtcggctcacctgtggggctctgtcctgctcttgcagcctcccagggtcactgaaaggttcttggctgaaggagcagaaacctaaatggagtcctcccctctgttctccccatccctgcccgggagtccggtcccagtttgttcctctaagcggtcgtggcctccgcctgcagggctggccactcgagggaaggtggtacttcaggttcctcgagggagcggcttcggtgttgtttctctcaccgtcccgccggcgtcaccggtgctgcgtgctgagtgggctgggacgtaggaaggcctggccgatgacaggcacggcctgatgtgtgtacaccagaacctggatggtggctgacacaggccagacccagaaacccctcgcccacttgctggggtcatagtgatacagaagagaaagaaacacaaaacaagatgcccagtcgtgtgtaaaggaaacatcaggaaaacccctggccagtcacccaggtagaagcttctgggctgcaccctggggtgggcaaggtgtggctgtgggtgaagcccgggcctccaggccgcacccttcctgctggcagtcaggttttcaagccttggcaagccccgcacacacctgcccgtgtgcgtgtgtctgcgtgtgtgtgtgcgaccgtctccttggtgccggatgtgggtgctcatgagtggctgtggcctcgccctgggactgggaggccggttcctgctcagagcctgtgcccccgctccctgcttaactgcagggaagccaagcaggtctgcccacaccctgcagaccaagccagaagatttccagtgtggggtcgcctggtggagctggatcggccccaaaggagaggacgggactaggccaggggcagatgagaaggataagtgagagtctgtggaaacagccatacgggggagctgggggtccctcgggtgcccgctgctgtttgcagcctcccactcaggcatgcttggtgcacagttgcagggacgcaactcaggccgttctctagggtgccctgccctctccagccacctcttcccgtgtccccagcctttgttttgatcctgtttttcactccaggtaagctgtgatgggtcttttgatcctttccgttttgcactccgggtaagctgccatcatgggtctttctatgatgggcccatcatggtggccttagtattcctgcctgaggctgctgcagcgagccgtcctcaagctgtttctgtgaacagaacctgagcagtgggcatggggagttgaggaggagaaataggtatatgttggtagacactgtgtctgtttttcttcttcctcccaccgtggaacgttttgctactttgctttctgaagacaagcagcggacggcacccctgcggcctggagggccatagccgcctccgagcaggtcaggacagtgcaggtgtgagccagccctgagcaccgaggccaggtgtgagagcttgtcttaagggggactttcctgggaatgtccccagcttggtgttctggggatggggatactgaggccagttcactgagggctcagctgcctgctgggggtccaggagcttgagctcccttctgccctcgaggctctgtgggtttttgctaacagcgtttttgagatataattcacatcaccagcagttcaccatttcacgggcacagtccagtggttatgagtgtttgcagctgtgtgtccatcactcagtccgttttagagcatttttcaatcagcagtcactcctgggcccctggccccaccagtcaccagcctgccattggcctccgtagacttgcctgttatggacattctgcgtagctggaatcccacagtgtccggcctttggtgcctggtggctcacgtggcacggagggttcttaaagctcatcgtgccgtagcctgcgccagcctcctcccctcttactgtcgggggtcagcctttcttccttttcatggctaaatcgtgttccatcgtgtgggtaccggaggctccatcctgctcagggccagggccgtctccctggcacggccggtactgccctgtggctgagctcgctgggagctggagatcgcggcggggtagcatagggccggacaaaggcagaggctgggggctgtcggagccactccccctccctcctgcaggctggagccagaggcctgaggcccccacgcagtcactgtggccctgccgcaccagctccctggttttcaggtgccctgcctcccactgccaggcctcttcaggagggccctgaccgcacacctggcctctgcctgccctccgcgctgctctgccgtgggccccgggtggtgggatttactcccgaggctgtgtgtgcacagctagctcctcaagcccatcccacacaggggttttggaagaccttctccttgctgatggctggtctgtctgtttgctgcatgtcctggcacttttgaggtctgttgggggaccatgttggtgcctcaggggccctggaggcaggtcccatctgttcttctcatgggggctgtgagccacctccagtgcctcggtggacccttcgttgactggcccaagggtcacctgattcgcagccacagggggctggacctggcggtgactcgaggggccttggccctgcctcagtgctgtggtccacggtctgggcaaggggccgctgctgggtgccccaggggctgactgaaccatttggcaacagaactaaggtggctggtggctgggcccgtcctggggccccttgagtgccctttcgtggtaagccaggtgacccagttttgggagtaagccacagcacctgtttcccaacggctgccacagtcgtcacaaagcccccctcgtccgcaggagggcaggcggagggggagagggagggggtcgtggccttacaggctgtctgcgtcctgatgggccagaccccggagcccggcagggtcaggaatgagggcagcattcccatctgtggctgctagttgccgaggcaaatggtccccctagcacctgtgagtgggtctgggcggggaccatgtgggcggagagggcaggcagggccccgaagcgcatggtaggtggaggttgcagtgggtgtgaggtgagggtggcccagcagcccccttggaaaggcctctgccacccggtacagagacgcttggcgagcctcatcttctcggcctcccagggcccctcctgggagatgtgtggtgctggtctttcttcccaggtcccaggggccctgctgtggctccccagccctggctgagcagcctcctttctctagaacttgcagctgctcctccccactcaccaggggacctgtgggtggccccaggctggactgtccccacctgggcacagcctcaaggccctggtgtcaggcttaggcttggatctggctctgtcccttatgggtcatgtggccgcagcaagccccagagcttctctgagcctcagtttccccatttgtgagggggaatatcctggctttctccctcttctgagcactgacgggaagggctgtagagccaggatgagccgacatcaaccttctcacggtgcctgcgtgggggctctcctggacggacctccgcctctgctcctccccatccgcctccttcctctgtcaatgggagacggggcttcaactcttaaccacacaggtgttttatttttgtggtttttcccaagtcaccgagtttcttcaggaagggctaggtctcatttctcctgcgtcccacttggtgccaagcacaagctggtcacgcagcagatagctagtaagtgctaagtggtttcgaaacaacattttggggtgggaaacagagggagccacaccccggtgtgctttctgctccccagtggcctggaagcccaggaggccaggcctcggagccgtcagcatccccagccccacatcggagtttgagggggtggggcacttggtatgtggctgcgtacgcgccccccgagctgcggggaggctgcggccaccatcctggggtgagtgccatgtggctgcctggctgggatgtgctgccggcctcgctgctccaggccccttgccccacccagggctgttcctgctggttcccattgcctttgcaaacccggccagcgggctctgtgggacttctactttagggtgtggccgctgggggcccagctgttgcatgtcctctccacttctgaagagaggaagcaccctgggctggggaactgggctggctggccccgcctactcatgtgcagccccgcccctccagtgcattccaccccgcccccacttgtgtggacccgcccccacttgtgtgccccgacttgtgtggtgcaggaggccctgcccttgcttgtgtggccccaccccttggtgcaggaggccccgtccctccagtgcaccccacccccatttatgtggccccaccccaccccaccccaccccacaggcctcctagctgtccctaactcctggcttgcctcgcggggtctactgtcctggggcctaggttgtcagcgaagtcctgctggttgcagggaaagggcctgctggaagtactcttgggggaagcagagacctcttcaccggcctctccattcctaaagcggttggttgcttcccagctgttctacagaccagcccagcagctgcaccctatgctgggggcagcccgggggtgtctacgcagagagtatagttcacggtgcccccttgagatccctgcctcggtccctggacctgcctgcccccagctcttctagctgtctccagtgtatgccctgtggggtcactggcgaccatagcagttgtccccaatcctgaagaccctgagagaggcaggtgtgcccacacgtcgttggagtgcagggcaggagtctggcccattcgggctcctggggctgctttcttgagcgggcaggagggggctgccggactgccggaagtggaagtgaccccacgcaagggtggcctgaagccagtgtccagccaggggcgtgagtagcagagaagcagatgcctccctgcggttcccaagctgcccctgccacagaggcctttcccttggagaccctttagtgcctctggggtctctggccctgcatgtccctcacctggcagcctagagctggccggggcctggctggtggtgcagccatgtgggtggtgcatgcaggtggaggctgttcaggcagctccacgggctggacgggcgcccccatctacagggccccccacctcagctgccgctgatgaaggggaggtggtggctggtgcctgactctggtctttgggggtgtagcatgctgtgtcattgtcagatgtgggttccctcagcgacccaagagctgggtgtctcgaagtgattgccggggtctccagtgggctcagaaacctggcgccagctgcaccccacctgagctgcatgtatgcggagcaccaggctcctgggagctgtgaggctgctgggcagcgaggctgggcccatggcacgtgtgaggggcggcttcatgctccagggtgcctacgaggccgaggcccccgatgcgcactgcccgcctccactgccgggctcattgtgtggcagcggccaggccttcagcctgagctgaaacagggacacaccacaccaggccctgggggcagaggtggggctgcagggaggggtgggcgtgaggttggccaggccctgccccagagaggcaggcagagtggatttctctgtctgcctgccagggtgcccttgagcggggctgggcccgggggcctcctgttgttcaagaactgcttgtaattgagatggtgttttgggatttccatgaaaagaagtaattttagttataggtcagggcactggggctaggaagcatttggggtgtttgttaactaggacgggagagctttacgtaaggggcccggcccggagcaccgccctgacggccttgggcagcggcaccttcactccccaggaccgtggtcgttgccacatttgctgggccaggtgctgacagacgtgcccgtctgcctggagggaatgttctccacaccacgcggggcacggtggacatgctggggcaggggacaccttctctgtgggtttatcagtgtgtccgcggggcgtggtcacagcctggtccagctcctccttagaacagaggggtgtggctgtgtccacagggcccggaatggggctgagagcagagcccagcctgtgcccaccgctcgggggcagggagcagggcccgggggacgtgtccacatgccccatcctgcatctggaacccagggtgggaggcgagtggcccacccactccctgggctgggctgggctgggctgggctgggctgggctgggctgggctgggctgtgggcacgaggacctgagtgtgaggagggagccccggcccgctggatgcaacttgtccttcctaacccatgtgcactgagggtggggcagccgggcccctgctcagaatcgcactgggcatgggctcgacttgctggccctgggacgaccctgctcagccagctctggaggcttcctcagcggcctgaaactcctgctgcagaggagggtagcattgccctgtccactcaccacctcctggggcttttctggacagagatgcccggggctacaaggagagccagggtttctgctgggttaccttcccctgttccctttctgagatgatgggggaggagggaggtgaggcaggtgcagccctcgctggccggtcgtgagtgaggagggagagatggccccgcatccctggggatgctgcctcccagagaccatgggggctccgtagcaccggcaggatcatcgtgggggtcctgggaagcggcactggtgctctgctcactgtaatgcagggggctggtggggggcattggtgcccccaggatcccccctccggctgccccccatctctgggtgtgcgaggcctatagcctggattgaggtctgagaaaggggagagatgcgtgctatttaaagggtgtataattaacacagcagagacaaagcaccctcgttcagatcttcagagaagataatagcagggccggtgatcgccagcgtggagtctggcgacgtgcggggggtgtgaagcccatcctcgttttcacaaagctcttcaggctaaggctgtctgtggacaacccctcccccccaccacccccgtgaggacagccgtgtggccatgtttctctggagtaacatctctgaggggtcctgaccaggaaaaacaggagtgtgaggagccaggagccacggagccctctcagggcttctgcatccgcagctgacacagggaccctcagtgtccccggggccagggcagccaggggtcgggcactctgcttccccaagcctcagggctgggccactcgaacatcttagcccccacttctcctgcatcttgccaaccctttgctggctcttggggacagcttggtctgtgatcctctagcctgtttgtgtgtctagcccactggtgtggacagaagcgacctgctgtctcctgtgcccgtgggcatgtgctcaccagactgtccatcccaataccaagctgtgggtctgttgggacctgttgttcctgggcaccccttgccaatctgctgaaagctctgggcctttttcccaggaaaatggggaccgtcagggctcatggatccctgatcctgccaaagtggcactgttcccttcctgaggatcttcctgtaatgccttccttggggagcggaatgaccagctcttccacctgccaccggggccagagggtgcggcttaccctctgctcagcccagcccgggtcttgctcagagcacgtgtgttcagcgtgagatttaagggtcctcccatctccttttaaccacctgccatgctgccctccctcctctgcctgggtaccgtgcccatcagcctgggaggcctggtcagtgggttttagagcagccactggctgcagcctgcaggtggccagtgaccatgtgctacttggggcacctgattctcaccccacacaccacagctgaccggtccgcagccgcatcctttcgagtaagtgttacccatggtgacagctgaaggccaagaattacgttctcattcatatgctgcaggggacctggggggttaaagaacgtgggaaagctgcagcagccgtggcggatgaggtaaaccaaagccgccttggttttttctggaatgcccctcccccactctgagtcaccgcatgctgcggagaggagagatgtgttctgatcacttttgtcttctctgatcacggggctgttcagcccagggtgactaagtgggagcattctgtgggtcttaaatgctttcagctgggtgtttccatagtgctgtcgccatggcacccagctaagcacgcagccggtggctcagcggcgggcggggactggagggggccagccactgggactgcctgcccatggggcaggctcagggccgttgtaaatggccgggctgccaggtaggaggtacagaccaggccgtgctctgtcccctgcactttccacacagctcggacgtgccccgtataggtcatccccgtccaacagcaggtcacagttggccgggccctgcagtgctggccgccacctcctctcctccccgtccccgcaccggccccttgtgtggtgaagctcctgcctggcctagatttccaggatctgccctgtacagtcgtggcctctctgtatgaggagtcagtgtcctggaacagcaggtgaggagaggcagctgtcattcctagacagagtggcagccgcatgtcatgcgctgactcaggctctgccatagccagatgctcatgtgggggctccaaggcaggaggtgtcagctccccccgtccttcgggggctggccatccctgccttgctgctctgggaacatctctcctccctgtccccaggatctggaggggccccgccagagcaccgtgcagccgtactttctgtctctcccccgacttcccctgggtttctcttgtgacctgtgtgccactcccagccatttacggggctcctttgagtaagtggaagacttaaaaataaaacaccaactctcttcccggccagggaggctgccgtaccctgctaatgaggccagtacccctcgctgtactctcccctggggaactgagcatgagcgtgagaaagtaccgtagcctaaaaacccagaaaccgcctgtagggtgggcaaccggagcagctccaggggccttagtttggaaggtgccgttctcagggtgaggagacccagggggccctgcagcctagtttacactgctgtcctggggtgaccactccaagcagcaccttctcttcccccgagtcctattcagacagcaaccagtgtggaggccgtggctctgggcagccccctgggcctgccttttctcagtgcctcagtttcttttgccaggcgttggatctcctgctgagtgctctctggccctgagctctctgcccaccatgctttccgggccggccaccgctggaaaagtccccagggagggcacagaatcctcatgatggggtgcgttgggggtttctccatggaacctcacacacattcctgaggctgccccacttaagggattctgggcaccgaatagctccctccaaagcaggcacccccatcacaggccactcagagcctggaggcgcaccccagcatccctggcagttccctgcgggaggagcggggcaggaccctgcaggcggccttggaacaggcctgggtgttggtctgagtggtgttgcaggggcatgggtgggtgctcatctccaggcccctccttgtgcacaagcccacttgtttctcggagcacaccctccccacccagtccctttgatcctgaaggtcaggaaaggagtccagcagccaggctgaggctggagcacagcgggctcaggtgtcctcctccatggctgcagtatgtggcgtcctggccacggccatcatgccctccccaggccccagggtacccctgaatctggctgtcgcactctaccccttcctggagaaggagcctcagaggtcactggaggttcttgggagcaggagcaggaagccctggtaggtgcatgttgcataaccagaggaaaagtacttcgcgctccagctgtggaggaggaggaggtggaggagaaagtagaggaggagaagaaggagaaaggagaggaggaggaggaggaggcagcggcagtgggggtggcggcagaggcctcagcatggagcagagcttgctggaaagtctgcttaaggttgccttgcagggcctctcacctgtgatcaaacttctcacttcctaaatgccatctcaggtcccctttaggtgaccctgtggccaggccctacagcgcctctggagggtcaaggcctactggggataggagtagcaagcccgttgttttgaggggcaggtggggtttagtgtgggaaagcagggtgggctgcaagggcaggggagcgccgggctccgtgttgggggatgtggctgggcaggctctggccttggggacagcatggtctgctcacactggccagcaggcagagccagtgcccggtggtagtgctgggaccgacccacaccctgccaggctggttctcacccctgtagtggaggcttgcgggggtaggcagccagggaacaggctgctccgctcccctccccgccgcccacccggcccggcactgcccacccacgctgagtcagagctgtaggcggggcggccgcgaggctgagtcaggcaggggaggccgcccccttgcggaggccgcatcttcttaagagccgattctgaactgaccactccttgacgggcaatcccggtggacggggggtctgagtcctgctgtggagggtctgcctgaggccggtaggggctcagcccaaggtaggtaggcacaggaggagaggcgagacagaggagagctggaaagaccttcctggcagaggagaagctggctccctgctgaagcagctagcctcctgcggcctcccaggaggggcctgggtgtgtccctggggacagggtctgtgcctcgggtgctcctcccttgccctcaccagccacccacagcctcatcagcgttttgggatggaaagtttccagcctacaaaaccggagagcccttgacatccagggtcccagtcgagccctcccactgtcgggctggggttctggaatcgggaaccccgggtgccgggtgtcagctgtgccatagggctgtggtgtcacgcgctaccccagacctcaggcacatgatccccaggccagctggggtcatggaggggccagcggggggtggggaggcatgctcctcccagagggacagaggcagagagccctggggtttggaactgtcacttccacctacagccctgttggtcaggtgagtcatacaacaagccctgcacccatgggcaggctgggaggcgcctctgcccaggatgggagcacagtccggggcctgggaggcagcggccgccctcagcttcttcgccactctctcccccaaactccccctctccagtttcctcccgaggctcacgttggagaggcctgggctcagctacagtttcttggtctggctttgcttgcactacttcttttaaagttttttttttttaaattgtgataaaatacacgtaactaatacagttgaccacggtaaccatctttaagtgcacagttcagcggcattagcgcattcatggggttgtgcgatcaccaccaccatccatctccagaactttccatcttcccaaactaaagctcttagtaccctccgtcctggtgtgttcagaatcggtagctggatctggaagctctgtcaggttgagactcagttttccttttggggaaatcattttggctggagcagcttctgtcgtctttgctggaaccctttctgggccgactgtgtgtccaccaagaagcacagagtggccaagacgtgacagccgccatggtcagagccagggccacagacgcaagggctgccgagcggctgaccgccgggtcagggtggggaccgcctgctggctgccctggttctagggtctggcttgactacctgtctttcctgtgcccaagagcacctgccagggctgagggttttccaaagcttccgcgtttgtctgggacacattctccccgtccccccatccccccatccccccatccccccatccccccatcccacggggacacccgggtgggcactcaggcagctccaaggtggaagggcagcaatcaggcctacttctcattcctggttccgtgctggcccctcacctgggcacaccctgttccgaaaggcgtgacctgtggatctgatcttgctgtccccgtggacgctggtcttgctttctgggctcccagtctccgctcggtgacctcttgtctgatcctccccacgaacttccttctcacgttctcccttggtgcacgcttatccggaaaccaggcagccaggtgtcttagcgtcccgctccccgtcattcagagccggagccgggtgggagaggagatgaggtgcgcccggagtcccctctgcagcagagggcttccctggggtccttggccactgtcctgggctccagctctcctgcctttcgtgctggggctgagatggctgagatggctgagatggaggggccctggaggcagaggcacaggtgagagtgctccaggcaacagggggaaggaccaagaagctgtcctggggcccatggagctggggcgcatccacacccaggcttctgtgccttggccacagggaggtgcacgcgaccccaccccacagcaggagccctgagatgaggctggccccctgccagagcctcctgctggaggcaggaccctccactcacccagagtggtcccggggcagggaagccttctggggatgtggccatcgggcatctcctgagtggtcccggggtagctgaagcctcctgggggcgtggttgtctcctgagtggccgcagatgctgttttgtttccagctgctctgcatgaatgagacgtgtcctttgactgagtccgtggggctgccccaaaccggtcctgacaggcgtccttccatcgctggctgagcctttctccctttccctccacagtacatcgacgccatcagcaacaagcagggcgagctggagaattacgtgtccgacggctacaagaccgcactgacagaggagcgcaggcgcttctgcttcctggtggagaagcagtgcgccgtggccaagaactccgcggcctaccactccaaggtgaggcggctgggggctgcgctgtgccggcgctgggccttgctggcagaaatgacccaggcccctgccccagccccagccccgtgaacacaccggggcagtgtccaggctcgaactctcgtttatttcgggttttcttgggggtgaagttctgggagaattaccaggtcacagggtgcaggcattttgaagactcacattagaaattgccacctgcaaccagggagagtctgatgggctttcaaggccttctagaacattcttctagaatgttcttggctcttctgccacagccatgtcctgggcaggtgcaggctgacgccaggcaggggacggtcatgctccgtgctgggtgccggagtcccggtgggacacctggtgggtggcctctgtgtcctcacttgctcttcctgtggcccctctatccacagtcctggggtacagcctctgggctcatggctctgctcacccgaggcactgaggacccccagccccaagcctgggtccccagccacccaagaccactgtgccactgggcccctaggccacccaagacaaccatgacactggccccaggtccagcagctgccatagctcggctgtcgtacgtggacctgccacccctcacccaacccaaacctgccctatctctttgcttcctgggtagccaggggccctgcctggctctcaggtggcctccccagtccctccctcactgctccagagtggcctccctgggactcaaacctggtcacagggtcctcccctggctcccaggctcttggtgacctgtgcctctaccacctctgcctgcacccctgagccactgtggtcccaggtggggccttgggtggtggccacatgctgctgccctcgtgacctctgagagacccctctgcccgtcatctgttgagggcccctccttgggccggtagactcttggccctgtgtttcccgctaggcgtcccccggcacagtcctgcggccctgtgtctcccgctaggtgtcccccggcacagtcctgcggccctgtgtctcccgctaggcgtcccccagcacagtcctgcagccctgtgtttccggcatccccagccttgtcgttccttgtgggggaatcccgccctgggatccgccatgtcccaggaccaagcctggccctgctgaaccaggagcgagttcctcagggacgggctgcagcagccccctccatggatatcctgagccccgatgtgagcaaggggatcccctcctaggaggctgacttagcccccagagcaggcaaggcccagaggccagactccccaccgggaacaggcagggccagcaggcccctgttcacccatagtccatgggtaggagttgggatgggatcacatgtgtcccctggaacattctggaacatttcaagagtttcgaagatgtagttccggagccaagcccaccagggaggccctggtcatgtctttctaaaataaagggttgcagggatccacgggctataccttgacacttgttccccccacccaccacactctcatgtacgtgcgcgtgcgtgcacacacacacacacgcacgtgatacagaaccagtgctccagtccccacagcctggggacagccaggagacaagtgctcttccctccctggagaggcccctcctgccggcctgggcctgctgggcactgtgggcaggtgcaggcaaggacagcagcagcacctttgacccctggaggcagcctcgctgctgaaggactcagcggtgacaggctgtgctgccacagctgccaggcagggagcgctgtggagcgcaggcctcccgcctgctagacccaggacagtggcgggcgtctgcgccctctggcgggggccaggccccatgacggggccagggagtgagagcggggctgtcagtggctggggtgctgcctgcagggatggagggcggggaagccaggctgcttgccgcaggtctcccaggaggggttgcgggatgtgcctgcggtggcagcagctgacctcctgggctcgtgggcccccgggcgtgtgtggaagaggcctgtgtcccacagacccacttagagacgagcctctgggctgggggccagggtgtgagggcagcctcccagggcagttcgtagtagctccctggtgcttgggtttgggcctgcctcggggctctcagggtgcgggggtgacgctggctcgtggccgctgtgtcagggccgtgccgctgcgaggtcggtgtccctcggccgtctgccctagtgctggtccctgctggcctctccgcgccacccaagactcactcctctaccactgatctcagccagggctcggcagacgttctgaagggccacaaagtttgtgcttttggctctgtgggccgtgccgtctccagctctgttactgcaatgtgagggcagccatgaatgaatgattcacaaatcgatgcacagctgtgttgcaataaaactttatttacaaaacaggaagccagccctcgggctgtggtttgctgacccctggtctgagccagcagcagaggggtaggggtggcatggggaggacttgctcagaatggctgtcgtccaacatcctccgtgggtccccagcgtgggtgcccagccacatgtagaagggaacggggatgagttggggggagcagtgaaagccggagaggcccccagaggtgccagagacatagcagttctggcccacagcttaagggtctgggggtcccgggaatccaggccctgcagcctgcttaggccaaatggccaggaggggcaggggttacttgattagctcccaggacccaggcccggccggctcccagtcccagaacctttctccatgcctgtggcttcctcctcctttgtccccactgtgctcagctggtctgtgtccagcaggccgcagagtacgcccgagggagcgcgggctcttgggcccaagggcagtggttggagcagtgagcctcagtgtgtctgacggggctgccttcctgccctcggcagccaggcctgacccccactgggcagcaccaccccctcccccggccatctggggcgccttcctggcactttggggtttgcccaccggagtttgaccttgtgcgtccctgtccgttcctccttcctccaggccctgatgggccccgcgggcgttgagcctgggtttgctctcatccctggaggtcccccgactgcatggcttgtggtccatccccggccctttaccggcagccgcttctgtgggttggggtcagaggctcacgggtggcctgtctcgccgagaggtaccacctggtgaagagcagcctccagccccagagagtgctcagggagggccctcagcgctgtgcctggctgcaggagactgagccggccctgacccctcccttcctgctgcttccacttcagggcaaggagctgctggcgcagaagctgccgctgtggcaacaggcctgtgccgaccccagcaagatcccggagcgcgcggtgcagctcatgcagcaggtggccagcaacggcgccaccctccccagcgccctgtcggcctccaagtccaacctggtcatttccgaccccattccgggggccaagcccctgccggtgccccccgagctggcaccgttcgtgggggtgagtctgtggcctctggaaagcttcacgggtgtgggtgggagggcagcttgttgtcagggcggggggccgccagggtgcagagtccaggggcccctgctgagggggcggagggttctctttccccctggtcttgcccggggtgggctccagcaacagcctgctctgcctgcttccctgcagcggatgtctgcccaggagagcacacccatcatgaacggcgtcacaggcccggatggcgaggactacagcccgtgggctgaccgcaaggctgcccagcccaaatccctgtctcctccgcagtctcagagcaagctcagcgactcctactccaacacactccccgtgcgcaagagcgtgaccccaaaaaacagctatgccaccagtaagggctccgctggggtgttgggctggggtccctggacgtgcctcctcagaccctacagtcatgccacaaccctcaataggggcctgggagaccctgaggctcacaattatgtgaccgtgtgtacctacatgcatgtggtacacacacgtgtgcctgcccagcatccagctccctcttgtcaagcctctggtgctcagtgggggcatgagtggggtacagggttaggctcatgcaggcagcagccacttgggagcaggtagctgctgctgcggagagcttagccagcccacttacccacctggggcacaggcggctgtgctctcagcacctcaaccagactccctgggctttgctgccccgccagccaggggcagtccccttacctgtcccttgtcccagcagccgagaacaagactctgcctcgctcgagctccatggcagccggcctggagcgcaatggccgtatgcgggtgaaggccatcttctcccacgctgctggggacaacagcaccctcctgagcttcaaggagggtgacctcattaccctgctggtgcctgaggcccgcgatggctggcactacggagagagtgagaagaccaagatgtgagtgtttctcgggggcgggctccaggcagccgctgccttcagcaagtgtgtggggcagcgacactcaagtgcactgagaccttgtgtttagagtggctgtgcaggttgcgggtcctcgccgtagaagacctgggcagtgagagcaagcgtgacctggggtcttcgccaccaacaggcgtcttctcccctggcaggggtcttcgccccaaccacctccctgcaggggtcttcccctacaggagggatctccccccaacagcagggatctccccccaacggcagggatctcccccaatggcaggtatctcccccaatggcaggggtctttccccatggcaggggtctccccccaatggctcgggtctccccccagcggcaggggtctccccccagtggcaggggtctgccccatggcaggggtctttccccacggcaggggtctccccccaatggcaggggtctccccccaatggctcgggtctcccccacatggctgttgtcttcccccatggctggggtctttcaccacagagtctagtgaccaccttgctccatcgcctccctgtgccactcagattgccgcagggtgtggcatcccacacgtgtacacactcagcacgtccagccgaagccctgtggtgggcatcagtttcccacagttcgcaggtgcagagcagggcttggccatcctgagaccgcaggctttctgtggctttcagctcttccacatgccagacgggctctccagtttggagttctagaagtcacctatggagtcagatgggccacacctcctcagtttactgaatgctgttgcagagaggctgggccagggtgccaccctcgctggacctgggggctgcattcccagggctgtgtttgtgcgggtgtgtctcttggcaagatgggaaaaggccctgacatttgtgccttcctaagcttggccttgcagccatcactctgaggagggggccgagggcagggggtctcccaggaggctgctccatctttcttccagtggccactccaatcttggtgccatccgtggcttagcgtgacactggggctgcgaggcaggagcaactgctctgcccgggctctggggccttgcagttgggtctggtggggccggcagctcccaccaggttgaggacagcccgggccaccttgcccttgaggctgagcacacagtgggagcgggctgcggtctttgtctccctggagcactgtctctgttgctccagagacagccgcgcagccatgctggggagctagagggacttgtgcatggatggtggtcggtgggggatggggagcctctgggctgagcgtggctcttacctggggcctctcttccaggcggggctggtttcccttctcctacacccgggtcttggacagcgatggcagtgacaggctgcacatgaggtgagctctgggcccaacgggagtgtaagatccccagctcgggagaggggctgtgatgacaccaggtccctgggcttggattgctcggctgggcttccggctccttgtctgctaccgcagggccatccccagtggccctgagagctggacgcttgaggccttcagggtggaggcatggtggtgccctgtgcagtggggcccgagagccctggggacaccagagcaggcagcaggtgctatgggggcagctcctgggggccaggtgtgcaaggacctggctgtcccaggtcctccaggttctcccagccttcagagaatcgcagctgaaagcggggtacatggctactgggagggtcaggggttgctgtggcagcccagcccctctggagtcctcccggcttagcttcatggccaggaggaggaagggaggccagactggcccggcccatggtccccagggctgccgccttggcctgagagcagcctccccgcatgtggcgtgggctaggtgagggcgggcagtccagggagccacagggttgtggggtgttgggggcatccggcctgctgggccgcctctgagtccctgtccctacagcctgcagcaagggaagagcagcagcacgggcaacctcctggacaaggacgacctggccatcccaccccccgattacggcgccgcctcccgggccttccccgcccagacggccagcggcttcaagcagaggccctacagtgtggccgtgcccgccttctcccaggtcagtgggcggggccggggctgggaggggcccgcaggtggaacagtgggctcagcctgcagtcccccgttggagcctccgctgaggggcggggcgcctgggggtctgggtctttggacagccctggggtgaaggctgcatgatttgggaatgtgtacacacccctgcttcggcctcaggctgcccgcctcgccgcagcaggctccctgtgtcggcatgctggggctggggtcagcctgtccctcatggtgccctcagccagccacgggcaactcactgctctgtccaagggggcagcgtctgggctgggaagtggctggcctagaggtgggcctggacgccgccgccttttgggagagccaggggggcaggatctcttccgtgagaaccacggggctccctcagtcacatccatgagatgggagtgcttgctgctcagccctggcatgtggctggaccccttccagtcagtgtgaccctggatttgggccatctggtgccgggaggccagaggtggaggatcagggcctgggtcctaggccctggtgtgggttctcggaaacccgggatcatggcggtcctggtatctaggctggggcagggtgtgagcgtgcatctcaacttgccgggttccagcccgctccgtccagggaggctcctggggttggagagttggagacccctgtctgtctggggctcctcagccagaggtccagtttgtgggatattggctgggctagcagctttgttcccggggccggtctccagggctgggcctcaggcagtgagtagagagaagaagagaacccacctttttccgagataacaggtagcctgggtgactactcagctattgacccacaagtgaggagtccctagattgacagcctgagctgaggccgcaggaggcaacctggagaggtttgggctctgggccgtgggtgttccacaggtcagcctctggggtgggctcagtgctgggagagccaaggaggggtctgcatctgccctaggccgcgggccaggccatgctggcagatgaagggcacagccagccccagcgccacacctgggcgctcctcccaggcagtgtcaccctcccaggggccgggatggtacatgtgacaagtttccaggaaactgcagctggggtctgggtctggtcctgggtcctacaagcaggcggaggagtcccaggggcccgcccaggcatgggtgaggtgctgcaggtgccctgcgggggcctcggctccctgggggcaggaggaggggtctcaggcggccagtcttgcatctgtttgggagtgtgcaacaagcacacaaattgaggtggccgctggctggaggaggtatcccctttaatttgggcagtcattactttaccactgggaccagggctccaggcaggtctctgagtgctgcagccaggagatggggagccttccaaaggaacacggtttgaaccttgtccaggcaggatcaccatttgtgggtgtgtacaggcagcgggtgggggtgaccacaggccccgtcacccggcctgacatgtttctgcctctgcccccagggcctggatgactatggagcgcggtccatgagcaggtaaggggactttcagacctgtctttgggaccgtgggtgggtgtgaagaggccgggtggggcaggtccctctgctaggacctggggccacctcttttcctttagggcccagcctggcccttcacccctgtcagagccggggatgtcccttagggcgtcctgctttctccgagtgacacgggaacccccctgggccctgcccctctttcatcgcatctggccggccccatccatccctgtcaggcaaggttggggagggtagctgaggctggcatccatggctggggctgcagcctcctctgccccaatctgtgctccgcccttgtcctgggtcttcctggagggtcaggaggccaacgggagctgctgaaaggggcattgctcggtgctggcggactcgccgcctgtggctgggcagcgtcgtgcagccaggcagccgtcctgtgctttgtttcacagtggcagcggcacgctggtgtccacagtgtgaggacgctgaccccgggcagccgctgctctgaagagcttccgcgccttccccctggtctcgtccgttttcctcctcagctctcgctggtttgttcttgggttgtttttcttttccacctgccccatgccttttggttggtgaccccagactctgtgatcccccagggtccatggtgctgctccatccgccccccctcccctgtgtttacgcgccccatcctgtgtgtcccagccttttgagcagaaactgccaggcaggacctgctgggccgtgcggggcaccctcggcctcaccctgcagtgtctgtggcactcactgcttttctaaggctcgccgtgagccaggtctaaagtttgaagaaaaagaaaaatcttaaaaaaaaaaaaaaaaaaaaaaagaaaaaaagaaaaacaggaaaaaggactttttttttcctgaaaaacaaaaaccgatctgcatggactccggtgtgcgctgttatctcgcatccgacttccccggtgcgatggcctctgtccggacagggaaggtgctggggtccctggccgccccggcccctgtggaggggtgcacagagaaagggggctcgtgccaagctcgaggggcctcctgaggaagccggccgctcctgtgagggaggccgggcccgggcacctgagggcttctccctctggacactgcgggccaggtgtacatagagcagcgcggcacagtggcctcacctcccgtcgggcactggcgggagcaaggtcgggggcaggcgctgcccagctggccgcacacggacattccaaagacctccagagaccaccccacccccacattcctttgaccagccttgtgagggcatcgatgctgccccgggctacctggctgctctgggcagggtgtgcgggccgggcccggctgggggagggcagctctgggcacgccgcacccacgccccccacctgggggaaacaggcggttcctgcccggttcttcctaaacgctctcgtctttttgtgtgtcttggtgactttagaaacaaacacagtggactcagtggctactggtattgtctcttcccacactgaactctggggaattgagtgcagggcacagcccggctcagcctgcccgctggtgggagcccctgggaagctgcggcgctcctttatctgatgtggtttagtaaaagcctcccacacacctccccgtggcctgggacgtggctggtagtgtttgtgtgggaagcagctcaagacgcggaccgcgtgacattaaggagagctcaagggcggaccgggccctgtgtagagacccttccgcgccggcgttcccgctccgctaaagatttcaaatccaggggattccatgctcaatggatgaatgtagacacaaaacagcaacacttgtatgaagatgtaaagtgctgaacatatttttttcctgtttcctttccttttttttaaaaaatctgaattgtgccctgtactgcagttacttgtttgaataaaagttttatttattgcacgagttgggtatggacctccttccggttcccggcgtgcgtctttgccgtgggggccccgccttgtgcccacctctgccaggtattttctcggcactcagtcgcctgctagataacctgggcttgcacacggtgctggccccagtgacagtcgctcactctgcccgggctctgcggggggccgtctgcagctgaggcaggctcctggctccctccaggcccgcaagtgaggcaggctccgcaggcgccgtccagggagagccagagccccagctgtgtgccgactccgagtgctccagggttctaggtctcctggcagctcgcccgtggtcccccctcctctgcacccccgagtcctcagaccccatgctgcctccaactgagccttgtgtttccttgcagcgccgatgtggaagtggccagattctgagccgcctgactagagttagtaagttgcctggcgttctcgtgcagtcactggcctctccagtggttctccacgggccctctggcctcagtcacgcagcctgggtggggagggcccggctgcatggcggggccaggggtccactgagcctgcctctcactctgggtgctgggccttctctactgggtcccctccttgggttcatggtatctttctcccctcccggaagcttgtgggctctggctggctgtgcccggggctcctctcactgctgggtgtggctctggccctgaccttctgtgtggtcctctcctgccctgctgggcgcttcaattatagtcaaagggtgaccccggcaagcagctgcagcccgggcctttcccgcctgactcgcagcgccagcttgggctccttcgggtgtgtgtgcctttggggctgacagccttgtggggactggaggtcagggtcctggggagaaccctggggagctccataggcactggagccaggtgttgggcccactggggaccgggctgtgctgttagtctgaccttgcctcttctgtcccccaagccccacaacgtggacccaagacactggctccatccctagtgtggatctgcagacctggagggctgctgggtccaggtttgagctgacgctcactccggggaccacagggccattatgggtccaattccagtgggactctggagtccgggtctgagtccatttcctcacgggttgagtgggccactcccctggtgcctggtgtatatttgggatgtgccagggtgtccaggagcaggccctctgccctcatagggggcccttgcccacaccttccaatcgcctacacctgtgtctgggcgggtcctgcttcccaccacccttccatccccaagttgctaggagggcggctctgcaaagccagtgcctgcatccttcacaaaggacgttggtccctgtgtctccctggtggtcacagcaggcatcctggcccacgggcagccaggccacaggcagatcatggatctgtcttctttcactgcctttctgttgttgattttcggcaacaaattctggaagattaggtagaaaaatgctcctgaactttggggactggatggagatgctctgggttggccctggccaccaccttgccttccgcctccatcttcctcccttccgagacgctgtttctgggaggcctccagacccccccactcccccaggtccctctgagctgagggggctgaactgcccttacctggtgaggcttggaaggggtgaaggctcaaagatgaggctggcacagcctctgtcagggaccacgtcccttggagggcagagaccctgggtagcagtgccggtggggcagtggtgctcagccccagcaccactccacagtgccaggggccagtttcccggccacgcagtctgcctggtctgacaactcagctgggattgggggtgtcgaaagccacttgcagttggccaagagactccccaatcccattgccaccctgtcatgccccagctttgggccctgggaagggggccttggaatgagagtggaggggcgagcgtccctggccgctgtccatactcgtcagcggaggcccaagcgcccacgctggacccgattccagaagggcccaccttctgaagacacgaagaaacagctgacgcgagaagacagaaaacaggtgctgtccgcccggctctgggtctggagtcacccaactggtcgaaatgcatttgtgacggctccgtttcttctcggaatccttctgcttcacattcaagtcattggtgaagctgccgcttggccgagcgccgtggcccacacctgtaatcccagcacttagggaggctgaggcgagaggatctcttgagcccaggggttcgagatcagcctgggcaacctagggagacccccatcttgacaaaaaaaaaagttaaaaattagccaggcatggtggcacgcgtctgtagtcccagcttctcaggaggctgaggtgggaggattgcttgagcccagaggtggaggttgcagtgagctacaattgcaccactgcattccagcccggaagacagagcaagaccctgtctcaaaataataatacaatttaaaaattagaaaagccaccggtctcccctgcggccttgcttaggggcctctgaggggaggctctctgtgaggagacagagcccaggcctctgcattctgaggccagcgccctgcccgcccaacagctcccccacacatgacgcaggccctcctcagggtcctccgctcttggacacgtctggtgactttcctttgctggctggagaggtgctggtggtgtcattgggtagttcgtggcaatcgctgcccagggccatgtcctgcaggaggtggggcctggcacgtgtcctccggcagggaccaatgtctgtggctaacgtgtggtgaccttgcagtggccttgggctgcagactttgtcatattctattggctcagttaggcccccactcagcacagcgagctccccgccggcctcctgggcgcgtctttcccagacagctggggggtgggggccagggtggggaaatagggacgcccagcccctccttgtgggcctgctgtcccagccagccttgggctctggcctgcgctctccccatccccgccgacccccctgcccccgtcaggctgagattggacacagcatttgcagccccagccccagggtcctcagagccacccagtgtggatggttcagcacgctccacctggtcccactgttctgggagacaagaagagaaaaatgcaggttagagaacaggcctgcaccagtggagggcttcctacccctgcagctccccgtggggtccaggcaagcgatgtgcctttgccactgactttctgatgagaatcggctgtgattcggggcaggagtgagaaccacgcggctgcactgccctcggctgtggtctgggccagatctaggacccttctctgggaacccacttttttttttttttttttttttttgagacagggtcttactctgtcacccaggctggagtgcagtggtgggaacacagctcactactgcctcgccctcctgggttcaagcgatcctcccacttcagccccccatggagctgggaccacaggcatgcaccactctcccgcacctgcctaatttttttttttttttttttgtagagacgggtacgctttgctgcccaggctggtcttgaactccagggctcaagtggttcctcctgctttggcctctcagagtgctgggattctaggcaggagccactatgcccagccagccccatttctaatctccccagagctccctccggaccctgggcctgcggaggaactcgggccacagagcacttccttaggagtgggtctagcctggcaggcagacagggcatgggcagacatcagtgatggaggtggaatcctcaccagcgggcccctaggcagcccctacccaggccccaggaagggcaaagctgcaccgatcaaagctgaaaaaagccggggatccagcagaccctgaggctccagcacgttgagagtagatcaaaagatcctttcagcagggtgccaatgcttagacgccatctgggagtctgggagccttccgcagacctgtcagtctcttccacgtactttattctcttaaaaactcagtctgtagtgtttcaagttcttagaaaacacaaagtcctcaggaaagcttagggagctgcctctgccctgtgcctcttcctgggcagctggacggaaccctgcctgcccaccccagggtttgcttccggctgcctgtgcctcttcccgggtagctggacggagtctgcctgcccgtccccagggttgttcccggctgcccgggctcttgtggacccagctgtgccagaggtgattctgctccaggtaatggctccagagtccaagcacagctttgccagagcacagtcccgtccctgctgcgtcttcatgtccacgtgccatctgtgctgtcacccttggagctgcctgacatcccccatcctgtcctgtgctgtcccctccgggggtggggactccaaagagaaaggctcaggcatccctctcatccgtgctcatcttgttccatttcaacttcttgtcttgagtcgtatttgtgcatcagctgtggccccggggatatgggggagggcgcggcacccctcgggggacaggtggctgagcccacagcaggtgaaccactgtctggcccaggggatggccagctgctctgcagggcccatgggtgtccatctgcagccctgcgggagccgtgagcctaacctgccttctctggatgcccccatgccagggctgggctggacgctctgccacgctgtgtccctgggtgtgggcctggcctggtgggggagccaccaaactggtgtgtgcccggttcaggcctgtcttgaatccccagcctcagtggtgatgtccgcccctcactgggaggttgtggctggcctgccccgccccaccccgccctgccctgcccagcccacactgctgggagggtgatggatcggggtgggggcaccctgccttgtctagggcacatagtggacttgggggtcaggcagccttgcagacagcgcctggtcctccctgccccgcaaagcagcgtatattgtctgtgagctctgtgccctgagatcggaccgtaggcatccagcactggggaatccctggggcatcgggcagcccaggtggcacaattcacccatggcttccgccctaaaaattaaaaccacgtttttctctttcaggaatccctttgcccacgtccagctgaagccgacagtgaccaacgacaggtctgcccccctcctcagctgatggccacatctgcagtgctgcccatctggtggcttcccccgcccttcccatgtagcctgttctgtcatcatctgtgcgttcctgtgtagagaacatccaggccccggctgcctggtcttgccccacttgagtctggcctggactggatcccagctgttctaggcagggccgggcagagtggggcgcaggcccctgaagggcgagacccagtggctgggctgcccagggctgaggggccgcctcttgagggtacacgcctctggtcacatggccatggagccttgggtacccctgagttaagggaggacatttggccagctggtggctgggaggggagcctggctgccctgctgcttctcctgcctaataaacaggcttctcctgcaccaggtgtgatctgtccgcccaagggccagaaggccgggagcacggggatgggagcgcccgcaccctggctggaagatgaacttcccgtaagcacgtaattccctgcaggtccggcagctacacctggagtgtggggcctggtccctccccatgcccctcggtggggctctcctgggcccctcactcccactggcaatgtcacaagggcctccccaggcccctcctgcctcgggcaggccccagccctcctccttacccaacctcccatccagaaccttgctgccagggcctcccagctcgctcctgcggccaaaggccagctgtcaggtgctatgcggggtcaccagcagagtgcccgctggcaggtgggggcttccccgcttccggggtctgccccaggactcctgggtggacctcccccccccacctccgctgactcctgcaggcactggggagctctgctggaattgggggttttaaaacttcattagcagatttgtgctcttccatactgtttgtttgtttgttaggtgaaatacagtgtggtgagctgcactggtgacaacagcccttacctggctggggaggtgtctccagcagagctcactcccgcctacagccactcacaccccggggacaggaagctgtagagttggcgggccaggagggcagttgagagctggccagcggagggtgcagggaagcccagctgtgctcaactctcctgcctccgccttccaccctgggcccagggacagacagacattgccctcagaagggcagggaggaggctgtcctggagaggcctgtaggtccattcttcacccgtccctaccaggccaactcggcctgcaggaagggagacctgcagggcgctacccctgcgcccccacacacagtagggccagaacaccatcccctccaccggggtgtgccgaggacagtggggaggagaggagaggggcagcttcctcctggccccaggaagggctggcatcgggttcctggcacagcccctcctgtccaggactttatcatcggcagacctcagaagacaacacacaaaggtttcttttgtcttagcttcatttctcttaaaaaacaaggaacaagaaaacattgcaccagcgttctaagcctcaaacaaaacacaaaacaaatccccctgcgaagcaacaataaactttacatctctttggcaacaat

SEQ ID NO: 22642 - DNA, 6005 bp, Homo Sapiens
gaaggaggaacatggagaggagagcagcgggcccaggctgggcagcctatgaacgcctcacagctgaggagatggatgagcagaggcggcagaatgttgcctatcagtacctgtgccggctggaggaggccaagcgctggatggaggcctgcctgaaggaggagcttccttccccggtggagctggaggagagccttcggaatggagtgctgctggccaagctgggccactgttttgcaccctccgtggttccgttgaagaagatctacgatgtggagcagctgcggtaccaggcaactggcttacatttccgtcacacagacaacatcaacttttggctatctgcaatagcccacatcggtctgccttcgaccttcttcccagagaccacggacatctatgacaaaaagaacatgccccgggtagtctactgcatccatgctctcagtctcttcctcttccggctgggattggcccctcagatacatgatctatacgggaaagtgaaattcacagctgaggaactcagcaacatggcgtccgaactggccaaatatggcctccagctgcctgccttcagcaagatcgggggcatcttggccaatgagctctcggtggatgaggctgcagtccatgcagctgttcttgccatcaatgaagcagtggagcgaggggtggtggaggacaccctggctgccttgcagaatcccagtgctcttctggagaatctccgagagcctctggcagccgtctaccaggagatgctggcccaggccaagatggagaaggcagccaatgccaggaaccatgatgacagagaaagccaggacatctatgaccactacctaactcaggctgaaatccagggcaatatcaaccatgtcaacgtccatggggctctagaagttgttgatgatgccctggaaagacagagccctgaagccttgctcaaggcccttcaagaccctgccctggccctgcgaggggtgaggagagactttgctgactggtacctggagcagctgaactcagacagagagcagaaggcacaggagctgggcctggtggagcttctggaaaaggaggaagtccaggctggtgtggctgcagccaacacaaagggtgatcaggaacaagccatgctccacgctgtgcagcggatcaacaaagccatccggaggggagtggcggctgacactgtgaaggagctgatgtgccctgaggcccagctgcctccagtgtaccctgttgcatcgtctatgtaccagctggagctggcagtgctccagcagcagcagggggagcttggccaggaggagctcttcgtggctgtggagatgctctcagctgtggtcctgattaaccgggccctggaggcccgggatgccagtggcttctggagcagcctggtgaaccctgccacaggcctggctgaggtggaaggagaaaatgcccagcgttacttcgatgccctgctgaaattgcgacaggagcgtgggatgggtgaggacttcctgagctggaatgacctgcaggccaccgtgagccaggtcaatgcacagacccaggaagagactgaccgggtccttgcagtcagcctcatcaatgaggctctggacaaaggcagccctgagaagactctgtctgccctactgcttcctgcagctggcctagatgatgtcagcctccctgtcgcccctcggtaccatctcctccttgtggcagccaaaaggcagaaggcccaggtgacaggggatcctggagctgtgctgtggcttgaggagatccgccagggagtggtcagagccaaccaggacactaatacagctcagagaatggctcttggtgtggctgccatcaatcaagccatcaaggagggcaaggcagcccagactgagcgggtgttgaggaaccccgcagtggcccttcgaggggtagttcccgactgtgccaacggctaccagcgagccctggaaagtgccatggcaaagaaacagtgtccagcagacacagctttctgggttcaacatgacatgaaggatggcactgcctactacttccatctgcagaccttccaggggatctgggagcaacctcctggctgccccctcaacacctctcacctgacccgggaggagatccagtcagctgtcaccaaggtcactgctgcctatgaccgccaacagctctggaaagccaacgtcggctttgttatccagctccaggcccgcctccgtggcttcctagttcggcagaagtttgctgagcattcccactttctgaggacctggctcccagcagtcatcaagatccaggctcattggcggggttataggcagcggaagatttacctggagtggttgcagtattttaaagcaaacctggatgccataatcaagatccaggcctgggcccggatgtgggcagctcggaggcaatacctgaggcgtctgcactacttccagaagaatgttaactccattgtgaagatccaggcatttttccgagccaggaaagcccaagatgactacaggatattagtgcatgcaccccaccctcctctcagtgtggtacgcagatttgcccatctcttgaatcaaagccagcaagacttcttggctgaggcagagctgctgaagctccaggaagaggtagttaggaagatccgatccaatcagcagctggagcaggacctcaacatcatggacatcaagattggcctgctggtgaagaaccggatcactctgcaggaagtggtctcccactgcaagaagctgaccaagaggaataaggaacagctgtcagatatgatggttctggacaagcagaagggtttaaagtcgctgagcaaagagaaacggcagaaactagaagcataccaacacctcttctacctgctccagactcagcccatctacctggccaagctgatctttcagatgccacagaacaaaaccaccaagttcatggaggcagtgattttcagcctgtacaactatgcctccagccgccgagaggcctatctcctgctccagctgttcaagacagcactccaggaggaaatcaagtcaaaggtggagcagccccaggacgtggtgacaggcaacccaacagtggtgaggctggtggtgagattctaccgtaatgggcggggacagagtgccctgcaggagattctgggcaaggttatccaggatgtgctagaagacaaagtgctcagcgtccacacagaccctgtccacctctataagaactggatcaaccagactgaggcccagacagggcagcgcagccatctcccatatgatgtcaccccggagcaggccttgagccaccccgaggtccagagacgactggacatcgccctacgcaacctcctcgccatgactgataagttccttttagccatcacctcatctgtggaccaaattccgtatgggatgcgatatgtggccaaagtcctgaaggcaactctggcagagaaattccctgacgccacagacagcgaggtctataaggtggtcgggaacctcctgtactaccgcttcctgaacccagctgtggtggctcctgacgccttcgacattgtggccatggcagctggtggagccctggctgccccccagcgccatgccctgggggctgtggctcagctcctacagcacgctgcggctggcaaggccttctctgggcagagccagcacctacgggtcctgaatgactatctggaggaaacacacctcaagttcaggaagttcatccatagagcctgccaggtgccagagccagaggagcgttttgcagtggacgagtactcagacatggtggctgtggccaaacccatggtgtacatcaccgtgggggagctggtcaacacgcacaggctgttgctggagcaccaggactgcattgcccctgatcaccaagaccccctgcatgagctcctggaggatcttggggagctgcccaccatccctgaccttattggtgagagcatcgctgcagatgggcacacggacctgagcaagctagaagtgtccctgacgctgaccaacaagtttgaaggactagaggcagatgctgatgactccaacacccgtagcctgcttctgagcaccaagcagctgttggccgatatcatacagttccatcctggggacaccctcaaggagatcctgtccctctcggcttccagagagcaagaagcagcccacaagcagctgatgagccgacgccaggcctgtacagcccagacaccggagccactgcgacgacaccgctcactgacagctcactccctcctgccactggcagagaagcagcggcgcgtcctgcggaacctgcgccgacttgaagccctggggttggtcagcgccagaaatggctaccaggggctagtggacgagctggccaaggacatccgcaaccagcacagacacaggcacaggcggaaggcagagctggtgaagctgcaggccacattacagggcctgagcactaagaccaccttctatgaggagcagggtgactactacagccagtacatccgggcctgcctggaccacctggcccccgactccaagagttctgggaaggggaagaagcagccttctcttcattacactgctgctcagctcctggaaaagggtgtcttggtggaaattgaagatcttcccgcctctcacttcagaaacgtcatctttgacatcacgccgggagatgaggcaggaaagtttgaagtaaatgccaagttcctgggtgtggacatggagcgatttcagcttcactatcaggatctcctgcagctccagtatgagggtgtggctgtcatgaaactcttcaacaaggccaaagtcaatgtcaaccttctcatcttcctcctcaacaagaagtttttgcggaagtgacagaggcaaagggtgctacccaagcccctcttacctctctggatgctttctttaacactaactcaccactgtgcttccctgcagacacccagagctcaggactgggcaaggcccagggattctcaccccttccccagctgggaggagcttgcctgcctggccacagacagtgtatcttctaattggctaaagtgggccttgcccagagtccagctgtgtggcttttatcatgcatgacaaacccctggctttcctgccagatggtaggacatggaccttgacctgggaaagccattactcttgtgtctgctactgccctcccacagtcaccccaatattacaagcactgccccagcggcttgatttcccctctgccttccttctctctgcactcccacaaagccagggccaggctccccatccctacctcccactgcatcagcagtgggtgttcctgcccttcctgagtctaggcagctctgctgctgtgatctgcacaccctccaacctgggcagggactggggggatgcagtgtgtgttagtgcccatgtggcattgtggcactgttgccccccatggcggcatgggcaagatgaccttccattagcttcaagtcttgttctcttgtctgtggtctgtttaatatgtgggtcactagggtatttattctttctcccatccttacactctggatcattgtgcagacttaatcagggttttaacgctttcatttttttttttttttttttttttttgagctcaaagagagttctcattttccctattcaaactaatacccatgccgtgttttttaccttggatttaaagtcaccttaggttggggcaacagattctcactcatgtttaagatcttgttatttcagcttcataagatcaaagaggagtctttcccttttctcttttaccctcaggattctcatcccttacagctgactcttccaggcaatttccatagatctgcagtcctgcctctgccacagtctctctgttgtccccacatctacccaacttcctgtactgttgcccttctgatgttaataaaagcagctgttactcccaaaaaaaaaaaaaaaaaa

SEQ ID NO: 22643 - DNA, 3028 bp, Homo Sapiens
aggctgtcagagcgccgcctcctccgcttgcggccggtctgcaccatgctgcgaacgtccgtcctccgcctgctaggacgcacgggggctagtaggctgtctctcctggaggacttcggcccacgctactacagttcgggctccctcagtgccggcgatgatgcttgtgatgtgcgcgcctacttcactacacccattttctacgtgaacgcggcgccgcacatcgggcacctgtactcggcactactggcggacgccctatgccgccaccgtcgcctccgaggtcccagcacggccgccacgcgattctccactggtaccgacgagcacgggctgaagattcagcaggcagcagctaccgcgggcctggccccgaccgagctgtgcgaccgagtctctgagcagttccagcagcttttccaggaggccggtatctcctgcacagatttcatccgcaccacggaggcccggcaccgggtggctgtgcagcacttctggggggtgcttaagtcccgcggtctgctctacaagggcgtctatgaaggttggtattgcgcttccgacgagtgcttcctgcctgaggccaaggtcacccagcagccgggcccatcgggggattcgtttcctgtatctctcgagagcgggcatccagtctcctggaccaaggaagaaaactacattttcaggctttcccagttccggaagccactccagcggtggctgcggggcaaccctcaggcgatcacccccgaaccatttcatcacgtagttcttcagtggctggacgaggagctgcccgacctgtccgtgtctcgcagaagtagccacttgcactggggcattccggtgcccggggatgattcgcagaccatctatgtatggctggatgccctggtcaactacctcactgtaattggctacccaaatgctgagttcaaatcttggtggccggccacctctcatatcataggtaaggacattctcaaattccatgccatctattggcctgccttcctgttaggggccggcatgagcccgccacagcgcatctgtgtccattcccactggacagtctgtggccaaaagatgtccaagagcttgggcaacgtggtggatcctaggacttgccttaaccgctataccgtggatggcttccgctactttctccttcggcagggcgtccccaactgggactgtgactactatgatgaaaaggtggttaagttgctgaactccgagctggcagatgccttgggaggtctcttgaaccgatgcactgccaaaagaataaatccttctgagacctacccagccttctgcactacctgcttccctagtgagccagggttggtggggccgtcagttcgtgctcaggcagaggattatgctctggtgagcgcagtggccactttgccaaagcaggtagcagaccactatgataactttcggatatataaggctctggaggccgtgtccagctgtgtccggcaaactaatggttttgtccaaaggcatgcaccatggaagctgaactgggagagcccagtggatgctccctggctgggtactgtgcttcatgtggccttggaatgtttgcgagtctttgggactttgctgcagcctgtcaccccaagcctagctgacaagatgatgtctaggctgggggtctctgcctcagagaggagtcttggagagctctatttcttgcctcgattctatggacatccatgcccttttgaagggaggaggctgggacctgaaactgggcttttgtttccaagactagaccagtccaggacttggctggtgaaagcccaccggacctagaaactcagttcttaccggcttgtggtaaaaaagcaaatgtgttatctttttattttttattttcaggaaagttatactagtattttcttaagtgtggaatcaaatgagcacataagctgtgtccctgtgaaaagaggtttgtagcctttcaggtgcctgctcctattcttcatttctctgtgaccattgatcactgtcctttgtgcattgtgtgtctaagatgtcttcaggggaaagatgggtaagagacagtgttgctaatgctgttccttctttgtgcctccttccaaaccacagttatttgcccaaactacctctcgtggctggtttttcattggcctggcctctgcttctcaggctaattagtgactcctttctttgagggtcagggttggaggccccttactggtggttttacagggggatcctactttgttacacatgttgggtttcctgataaaaagagagtattttattaaacccttgaaccagtgtcctagaccagatgatttttgcccatgtgtatccccatttaaattcctacaactaagtttccctgctttgttaatagtccaacagttgggttgtgtaacatcacacttcaaccggtagatggctctaatctcacacatttacttactaaagattgaggattcggaatatttagaataaattagttttctgctttctaattttgcagatctttacatttttattgcttttcttaaaataagggatagctttgcaaccactattgttttaatggaaagcaaaaaacccccccaaacttatcagaatcctcgttctttttcagactactgaaaaatgacatttactctgttaaatgtttaataagtgaataagtaaatgtatcaagttgtttatataataaattataaaactcttgaggcacttggtatgttaaaaattttaaactttagtaacattaggttacaggtatgatttaaaaatttgtaaatagttcaaaagggcaatgttttctttatatttcttatagtcttaattttgttatccatgtgcataatttacctcatgatttcttttggtcaatcaggatctttaatacaatatagaaattgtgtaatagttattataaatgttaatacacaactttcaggtaattttaactgattatttcttttgctcttttaacttaagttattaaagtttaaaagttcgt

SEQ ID NO: 22644 - DNA, 2441 bp, Homo Sapiens
gccgccgccccggccgtcgccccccgacgtgttcgcgggcttcgcgccccaccccgcggccctggggcccccgacgctgctggccgaccagatgagcgtgatcggcagccgcaagaaaagcgtcaacatgaccgagtgcgtcccggtgcccagctccgagcacgtcgccgagatcgtgggtcgccagggctgcaagatcaaggccctgcgggccaagacaaacacctacatcaagaccccagtgcggggcgaggagccggtcttcatcgtgaccggccggaaggaggacgtggagatggccaagcgtgagatcctgtcggcggccgaacacttctccatcatccgcgccacgcgcagcaaggccgggggtctgcccggcgccgcccagggcccgcccaaccttcccggacagaccaccatccaggtgcgcgtgccctaccgggtggtggggctggtggtggggcccaagggcgccaccatcaagcgcatccagcagcggacgcacacctacatcgtgacgcccgggcgcgacaaggagccggtgttcgcggtcactgggatgcccgagaacgtggaccgcgcgcgcgaggagatcgaggcgcacatcacgctgcgcactggcgccttcaccgacgcgggccccgacagcgacttccacgccaacggcaccgacgtctgcctggacctgctcggggcggccgccagcctctgggccaagacccccaaccagggacgacggccccccacggccacggccggcctccgcggggacacggccctgggcgcccccagcgcccccgaggccttctacgcgggcagccgcggcggcccctccgtgccggacccaggccccgccagcccctacagcggctccggcaacgggggcttcgccttcggcgcggagggtcccggtgccccggtggggacggccgcccccgacgactgcgacttcggcttcgacttcgacttcctggcgctggacctgaccgtgcccgccgcggccaccatctgggcgccttttgagcgcgccgcccccttgcccgccttcagcggctgctccacggtcaacggagccccgggacctcccgccgccggcgcccggcgcagcagtggggccgggaccccccgccactcgcccacgctgcccgagcccggcggcctccgcctggagctcccgctgtctcgccgtggcgccccggacccggtgggcgcgctgtcctggcgacccccgcagggccccgtatccttcccaggcggcgccgccttctccacggccacctcgctgcccagcagccccgcggccgccgcctgcgcccccctggactccggcgcctccgagaacagccgcaagcccccttcggcgtcctcggccccggccctggcgcgagagtgcgtggtgtgcgccgagggcgaggtgatggctgcgctggtcccctgcggccacaacctcttctgcatggactgcgccgtccgcatctgcggcaagagcgagcccgagtgtcccgcctgccgcacgccggccacccaggccattcatatcttttcctagagcgcggaccaccacgtggccggggccatctgcgggggccaggggtgggcgcgggagacggggcgggacccggggtgggagagggacggggagggggcgaggggcggaggccgagggggcaggggggtgggcggcggccagtgtttacagatgagctttaactgccgcctcaggcgtggagacggagaccccgcagcccggcggcgcctcagcccttcaacgacagtattgagtggtcaggttacaataaaccggagagaaaaggtccgcttgcactttttttagttttcttatttttagacacccctcccctccagggtgatctttaaaaaagcaaaacaaaaaacacgacttttccagcgctcagcgttttttcctttcgtccgaagccgttttctgatttgacttttctcgccggccggtctcaggccgcacagacgttccagaggaggagggtgacatttttactccctttttggggctaaccatttatgcttttgtacatcaaccgtgcgcggccggagggggcaggggggcgggggcgaggggcgttccaatcaaatttctaactttctgttaattattaatcccctttttactgcggtttctgttgtcatttttaaaatttttttaatttttttttttttttttacttttactttttacctcttgtgtatatgtagggaatttatagggaaatatgtactttatggaataaattttaagaactaaaatatattttattttaaataaagtaatggacctttaatcttacacagctaaattactgattatatatttgctgagctgatttaagggttaaaaaaattgtatcaagagttttattttttgacttcaaagccttcttaataaagcctcttttctacatgtg

SEQ ID NO: 22645 - DNA, 5857 bp, Homo Sapiens
agtgtccacgtctcctcgctgaaccttaggaatcccttggcaccatgtcctgtgtgcattataaattttcctctaaactcaactatgataccgtcacctttgatgggctccacatctccctctgcgacttaaagaagcagattatggggagagagaagctgaaagctgccgactgcgacctgcagatcaccaatgcgcagacgaaagaagaatatactgatgataatgctctgattcctaagaattcttctgtaattgttagaagaattcctattggaggtgttaaatctacaagcaagacatatgttataagtcgaactgaaccagcgatggcaactacaaaagcaattgatgactcttccgcgtctatttctctggcccagcttacaaagactgccaatctggctgaagccaatgcttctgaagaagataaaattaaagcaatgatgtcgcaatctggccatgaatacgacccaatcaattacatgaagaaacctctaggtccaccacctccatcttacacgtgtttccgttgtggtaaacctggacattatattaagaattgcccaacaaatggggataaaaactttgaatctggtcctaggattaaaaagagcactggaattcccagaagtttcatgatggaagtgaaagatcctaatatgaaaggtgcaatgcttaccaacactggaaaatatgcaataccaactatagatgcagaagcatatgcaattgggaagaaagagaaacctcccttcttaccagaggagccatcttcttcctcagaagaagatgatcctatcccagatgaattgttgtgtctcatctgcaaggatattatgactgatgctgttgtgattccctgctgtggaaacagttactgtgatgaatgtataagaacagcactcctggaatcagatgagcacacatgtccgacgtgtcatcaaaatgatgtttctcctgatgctttaattgccaataaatttttacgacaggctgtaaataacttcaaaaatgaaactggctatacaaaaagactacgaaaacagttacctcctccaccacccccaataccacctccgagaccactgattcagaggaacctacaacctctgatgagatctccgatatcaagacaacaagatcctcttatgattccagtgacatcttcatcaactcacccagctccgtctatatcttcattaacttctaatcagtcttccttggcccctcctgtgtctggaaatccgtcttctgctccagctcctgtacctgatataactgcaacagtatccatatcagttcattcagaaaaatcagatggaccttttcgggattctgataataaaatattgccagctgcagctcttgcatcagagcactcaaagggaacctcctcaattgcaattaccgctcttatggaagagaagggttaccaggtgcctgttcttggaaccccatctttgcttggacagtcattattgcatggacagttgatccccacaactggtccagtaagaataaatactgctcgtccaggtggtggtcgaccaggctgggaacattccaacaaacttggctatctggtttctccaccacaacaaattagaagaggggagaggagctgctacagaagtataaaccgtgggcgacaccacagcgaaagatcacagaggactcaaggcccgtcactaccagcaactccagtctttgtacctgttccaccacctcctttgtatccgcctcctccccatacacttcctctccctccgggtgttcctcctccacagttttctcctcagtttcctcctggccagccaccacccgctgggtatagtgtccctcctccagggtttcctccagctcctgccaatttatcaacaccttgggtatcatcaggagtgcagacagctcattcaaataccatcccaacaacacaagcaccacctttgtccagggaagaattctatagagagcagcgacgactaaaagaagaggaaaagaaaaagtccaagctagatgagtttacaaatgattttgctaaggaattgatggaatacaaaaagattcaaaaggagcgtaggcgctcattttccaggtctaaatctccctatagtggttcttcgtattcaagaagttcatatacttattctaaatcaagatctggttcaacacgttcacgctcttattctcgatcattcagccgctcacattctcgttcctattcacggtcacctccataccccagaagaggcagaggcaagagccgcaattaccgttcacggtctagatctcatggatatcatcgatctaggtcaaggtcacccccttacagacgctatcattcacgatcaagatctcctcaagcgtttaggggacagtctcctaataaacgtaatgtacctcaaggggaaacagaacgtgaatattttaatagatacagagaagttccaccaccatatgacatgaaagcatattatgggagaagtgttgactttagagacccatttgaaaaagaacgctaccgagaatgggagagaaaatatagagagtggtatgaaaaatattataaaggttatgctgctggagcacagcctagaccctcagcaaatagagagaacttttctccagagagatttttgccacttaacatcaggaattctcccttcacaagaggccgcagagaagactatgttggtgggcaaagtcatagaagtcgaaacataggtagcaactatccagaaaagctttcagcaagagatggtcacaatcagaaggataatacaaagtcaaaagagaaggagagtgaaaacgctccaggagatggtaaaggaaataagcataagaaacacagaaaaagaagaaaaggggaggaaagtgagggttttctgaacccagagttattagagacttctaggaaatcaagagaacctacaggtgttgaagaaaataaaacagactcattgtttgttctcccaagtagagatgatgccacacctgttagagatgaaccaatggatgcagaatcaatcacttttaaatcagtgtctgaaaaagacaagagagaaagggataaaccaaaagcaaagggtgataaaaccaaacggaagaatgatggatctgctgtgtccaaaaaagaaaatattgtaaaacctgctaaaggaccccaagaaaaagtagatggagaacgtgagagatctcctcgatctgaacctccaattaaaaaagccaaagaggagactccgaagactgacaatactaaatcatcatcttcctctcagaaggatgaaaaaatcactggaacccccagaaaagctcactctaaatcagcaaaagaacaccaagaaacaaaaccagtcaaagaggaaaaagtgaagaaggactattccaaagatgtcaaatcagaaaagctaacaactaaggaagaaaaggccaagaagcctaatgagaaaaacaaaccacttgataataagggagaaaaaagaaaaagaaaaactgaagaaaaaggcgtagataaagattttgagtcttcttcaatgaaaatctcgaaactagaagtgactgaaatagtgaaaccatcaccaaagcgcaaaatggaacctgatactgaaaaaatggataggacccctgaaaaggacaaaatttctttaagtgcgccagccaaaaaaatcaaactcaacagagaaactgggaagaaaattggaagtacagaaaatatatcaaacacaaaagaaccctctgaaaaattggagtcaacatctagcaaagttaaacaagaaaaagtcaaaggaaaggtcagacgaaaagtgactggaactgaaggatccagctcaactctggtggattacaccagtacgagctcaactggaggcagtcctgtgcggaaatctgaagaaaaaacagatacaaagcgaactgtgattaaaacgatggaagaatataataatgacaataccgcgccagctgaagatgttatcattatgattcaggttcctcaatccaaatgggataaagatgactttgaatctgaagaagaagatgttaaatccacacagcctatatcaagtgtaggaaaacctgctagtgttataaaaaatgttagtacaaagccatcaaatatagtcaagtatcctgagaaagaaagtgagccatccgagaaaattcagaaattcaccaaggacgtgagccatgaaatcatacaacatgaggttaaaagttcaaaaaactctgcatctagtgaaaaagggaaaaccaaagatcgagattattcagtgttggaaaaggagaaccctgaaaagaggaagaacagcactcagccagagaaagagagtaatttggaccgtctgaatgaacaaggaaattttaaaagtctgtctcaatcttccaaagaggctagaacgtcagataaacatgattccactcgtgcttcctcaaataaagacttcactcccaatagagacaaaaaaactgactatgacaccagagagtattcaagttccaaacgtagagatgaaaagaatgaattaacaagacgaaaagactctccttctcggaataaagattctgcatctggacagaaaaataaaccaagggaagagagagatttgcctaaaaaaggaacaggagattccaaaaaaagtaattctagtccctcaagagacagaaaacctcatgatcacaaagccacttatgatactaaacggccaaatgaagagacaaaatctgtagataaaaatccttgtaaggatcgtgagaagcatgtattagaagcaaggaacaataaagagtcaagtggcaataaactactttatatacttaacccaccagagacacaggttgaaaaagagcaaattactgggcaaattgacaagagtactgtcaagcctaaaccccagttaagtcattcctctagactttcctctgacttaactagagaaactgatgaagctgcttttgaaccagactataatgaaagtgacagtgaaagtaatgtttctgtaaaagaagaggaatcttcaggaaacatttctaaggacctgaaagataaaatagtggagaaagcgaaagagagcctggacacagcagcagttgtccaggtgggcataagcaggaatcagagccacagcagccccagcgtcagccccagcagaagccacagtccttctggaagccagacccgaagccacagtagcagtgccagctcagcagaaagtcaggacagcaagaagaagaagaaaaagaaggaaaagaaaaaacacaagaaacataaaaagcataagaagcataagaaacatgcaggcactgaagtggaattggaaaaaagccaaaaacacaaacacaagaaaaagaagtcaaagaagaacaaagataaagagaaggagaaggagaaagatgaccaaaaagtgaaatctgtcactgtgtaaaaagacagattttttaaattgacttaattactaagtcatctgtattaaattttgttataatgtaaagagattcaagccttgtaaataatgacatggaagaccctgtgctgcacttaaaatattgctgcttgattatttgatttttacatcagagctttataacacgaacttttgtacagaattgtgagttgtgaccatgtaacatgagaggttttgctagggcctattatttttaaccaccattaattagttggggtggagtttactgtaatgtgaaattttcacatttgaattttttaattgcctggcaaaagctgatataagttctaaaatatcagcagaatgatttgctgaattcattacatccctgttatgtcactttttgattacaataaaagttttcagtaaacttttcaaaaaaaaaaaaaaaaaaa

SEQ ID NO: 22646 - DNA, 1939 bp, Homo Sapiens
ctcctcagctccacctgacagtaggccgctgatcggccgcgggtcttgtcgaccgctaggccaccaggttcatgtggaggctcccaggcgcccgcgccgcgcttcgggtgatccggacggcggtggagaagctgagctgggctgaagcggggagccagacagcggcgggagcgatggagcgcgctgtagtgcgctgcgtaccttcggaacccaagctgagcctgtcattcgctttggctgatggtagccacaagaacatgcagcgcgaccagagcgagccgctgggtcgagtcctcagccgcatcgctaccaatgccctaaagggtcacgctaaggcggccgccgccaagaagagcaggaagagccggccgaatgctagcggcggtgcggcctgttcagggccggggcctgagccggctgtgttctgcgagcccgtggtgaagctgtactaccgggaagaggcagtggctgaggacgtgctcaacgtggatgcctggcaagacggcgcggtgctgcagatcggcgatgttaagtacaaggtggagcgcaacccgcccgccttcaccgaactgcagttgccgcgctacatcatggccgggttccctgtgtgccccaaactcagcctcgaatttggggatcccgccagctcccttttccgctggtataaggaagccaagcccggagcggcggagcccgaggtcggtgtcccctcgtcattgtctccctcctcaccttcttcttcttggactgagactgatgtggaggagcgtgtctacaccccgtccaatgccgacatcgggctaaggctcaagcttcactgcaccccaggcgatgggcagcgctttgggcacagccgggagttggaaagtgtgtgtgtggtagaggctgggcctggcacctgcacttttgaccaccggcatctctacacgaagaaggtgactgaggacgctctcatccgcactgtctcttacaacatcctggcagacacgtacgcgcagactgagttctcgcgaacggttctgtacccatactgtgccccctacgccctggagctcgactaccgccagaaccttatccagaaggaactcaccggctacaacgccgatgtcatctgtttgcaggaggttgaccgcgcagtgttttctgacagcttggtacccgccctagaggccttcgggctcgagggggtgtttcgaatcaagcagcacgaaggcctggccactttctaccgaaagtctaagttcagccttcttagccagcatgacatttcattctacgaagccctcgagtccgacccacttcacaaagaactgctggagaaactagttttgtacccatcagcgcaggagaaggtgctccagagatcttctgttcttcaggtttcagttcttcagtctacaaaggactcttctaaaaggatatgtgttgctaatacccatctttactggcatcctaaaggtgggtatattcgcctcattcaaatggcagtagccttggctcacataagacatgtttcatgtgatctgtatcctggcataccagttatattttgtggggactttaatagtacaccatcaacaggaatgtatcattttgtcatcaatggcagcattccagaggatcatgaagactgggcttccaatggggaggaggaaagatgcaatatgtctcttacacatttcttcaagctgaaaagtgcttgtggtgaacctgcttacacaaattatgttggtggctttcatggatgtctagattacattttcattgacttaaatgctttagaggttgaacaggtgattccattacctagtcatgaagaagttaccacccaccaggccttacctagtgtttcccatccctctgatcacatagcacttgtatgtgatttaaaatggaaatagatgtgtgtttaatggaattgaagtctgaaaaggaagta

SEQ ID NO: 22647 - DNA, 2244 bp, Homo Sapiens
atggagacggcggagaaggagtgcggcgccctgggcgggctcttccaggccatagtcaacgacatgaagagctcctaccctatctgggaggacttcaactccaaggccacgaagctgcattcccagctgaggaccaccgtgctggctgctgtggccttcctggatgccttccagaaagtggctgacatggctaccaacacccgaggggccacgagggacatcggctcggcgctcacacgcatgtgcatgcgccaccgcagcatcgagaccaagctgcggcagttcaccaacgcactgctggagagcctcatcaacccgctgcaggagcgcatcgaggactggaagaaggcggccaaccagctggacaaggaccacgcgaaagagtacaaacgagcccggcatgagatcaaaaagaagtcgtcggacacgctgaagctgcagaagaaggcgcgcaaagagctacttgggaaaggagacctgcagccccagctggacagtgccctgcaggacgtcaacgacatgtacctgctgctggaggagacggagaagcaggccgtgcgccgggcgctgatcgaggagcggggccgcttctgcaccttcatcaccttcctgcagcctgtggtgaatggagagctgaccatgctgggagagatcacccacctgcagggcatcatcgacgacttggtggtgctgacagcagaaccccacaaactgcctcccgccagcgagcaggtaatcaaagacctaaagggctcggactacagctggtcctaccagaccccaccctcatcacccagcagctccagctcccggaagtccagcatgtgcagtgcccccagcagcagtagcagtgccaagggtggcggagccccatggcctgggggtgcccaaacatactcacccagttccacctgtcgctaccgcagcctggcgcagccagccaccaccaccgctcgcctctccagcgtttcctcccatgactctggcttcgtctcccaggacgccacctactccaagcccccctcgcctatgccttcagacatcaccagccagaagtcctccagctctgcatcttccgaggcctcggaaacctgccagtccgttagcgagtgcagctcccccacctcggactggtccaaggtcggctcccatgagcagccctcaggcgccactctgcagcggaggaaggaccgagtggagctcctgcgagacacagagccaggccctgccagtgggggcaccctgggccccagcggggaagaggcaccgcgaccccggatgtcccctgccaccatcgcagccaagcacggtgaggaggtgtcccccgccgccagtgacctggccatggtgctgacgcggggcctgagcctggagcaccagaagagcagccgggactcgctgcagtactccagcggctacagcacgcagaccaccacgccctcctgctctgaggacaccatcccctcccaaggctccgactacgactgctactccgtgaatggggatgcggacagcgagggcccgcccgagtttgacaagtcatccaccatcccgcgcaacagcaacatcgcccagaactaccgccgcctgatccagaccaagcgcccagcctccactgctgggctgcccaccgcggggctgcccacggccactggcctgccctcgggcgcaccccccggcgtggccaccatccgccgcacaccctccaccaagcccaccgtgcgccgcgccctgtccagcgctggccccatccccatccggccgcccatcgtccctgtgaagacgcccacggtgcctgactcccccggctacatggggcccacacgggcgggcagtgaggagtgcgtcttctataccgacgagaccgcctcacccctggcaccggacctcgccaaggcctccccaaagaggctcagcctgcccaacacagcctggggcagcccatccccagaggcagccgggtaccccggggcaggggccgaggacgagcagcagcagctggcggccaaccggcacagcctggtggagaagctgggggagctggtggcgggtgcccacgcactgggtgagggccagttccccttccccactgctctgtcggccacccccacggaggagacgcccaccccacccccagccgccaccagcgaccccccggccgaagacatgctggtggccatccggcgtggggtccggctccgcaggaccgtcaccaacgacaggtcggcgccccgcatcttatga

SEQ ID NO: 22648 - DNA, 173042 bp, Homo Sapiens
cgcggaattcagctcacagaagtgttttttccacagggtgttttgctttgattttaaaacttgaattagatgcctatataaaaaatcaggatattgaatctaaaaatccaaatttctaaatctaaaaatccaaatttctaacttctcctgaaaagtagattgctccagcagttctggcctgtgtttctattgtatgctcctacactgtttaacaaaagttctgacaataaaatttgttatttaaaaagttctatttatgaatacaagtattactttgagtgctgttacttttatacagcctaagtgaggaggagtacaaattccatcttctaatcaccactgttctgtgaatctattcagtcttttatattttctgtgggtgtttaagtatttctatttcctaccaccaattgtcactttcagtactaggacaactagccaaagagattttactttcggataatttgttaatcaaggcatcatttagaaaaattacttactgtttatttcaaattgcctgactacataataatcatgacatgtatccttaaacacatgacctacttcactgtacattttacttgatcatcccagcacactgtctgcatggtcaacttggtgttcataaactgtgaaatcatgtgacatggtcaactcctacttggagcttgcttataccttatatagagagaggggctgtggggcatcactggtgagtgtgggaggcctgaaaggaagtcctatatctccctctcctttggatgcaaaggcagcacaatttggagcccagagttaaactgtggtttcagcattgtgaacacaagtgtaaagtcctgtctctgaagccttttcctgctctctcttaggattaggggctcctccctagtgtacccatagctttctgggactgttcctattactgcccaccccattgtattgtaattgcttgtttctgtgtctgtgtcctacctagaggtgagtcttgaagatgggaatgatgtctttcccatgattatagccccaggcccagcgaggccttcaggaatgatctagagacacagcactcttcaaccttgattattacagtaggtctccccactttgcattttcctaagtgaagcatgaaaccgtcatacctgcagatattatatgacagaaaataacagcatcagtttcccggtgatgtttagcattcctggtttctgcctctcatctcatctgacccggtaagtgtctccctatctcttaatcacaaggctccttatccacaactgtctcagagaggggtttaccagacatcctgtctctgttctcatctcctgggagcaggccaaaaatgacaatcaattcatttggctaattggtatactgctgtctctccacttttgcttcccaatgtccattccaggcacaggatttgtgcagtgcaacctctctggcagcctgctccaggcatttccacaagcaagggcttgacctttggccagcttgcagatcactattgggctgtgtctctattcaaggaccgagctttaccatgcaggtgtggagctaccttcttccagatctgagcttataaatatacagaaagtgcaggctgaccttgccaagtgttcaaggcccgggcactttcagtcctttggatgctgactagagtctttctcagcatttacagagctcccgcgggcctctgtctcaatgcctacaggaaatttgtctttgagtatgtaagcacttctgtggcataatttccaaggccccagaaaattccacctatccacttcctaatctgttctttcacgcctgaagttgcttaaatcaccaaaacttccatttaccaaagttttaaaaacccctaggagcaattaagttttttaatgtaaactttttattgactataacactcatacataaaagtgcacaaattatggttgtgaatgaaccactcatgtaaccaacaccaggaccagaaacagaactttgccatgtcctcagaagccaccccttcttccttgtatccctttgtagtcccttcccctccctcatcagggaaaccactatcctaacttggaacaagatagattacttttgtttgtttgtttgaattggcatatacaattataagtatttaccttgtacaacatcttgttttgaagtacgtatacaatgtggaatgactaaatctagctaactaatatatacattacctcacatagttgtcattttgtttatttggttttgtcttttatataaatgggatttgttgtatgtactctttttcatatgtaatgcttcttttgctcagctcaatactcatgagattcatccatgctgttgcacgtagttgtagtttgttgatttttatcgctgcatagtattccactgtgcaaataaaccaccttttacttaactattctaatgctgatggacatttgggttgtttctggatttttatatgcaaatagagctcttatgaacattcttgttcaggtctttcagtgaatacatatacacttctctgttggaaatacattgaggagtggaattgatgaaacctaggataggcacgatcagcattagtaggtacaagttactatcaaacatcttttccaaggtagctgttccaatttacactcccatcaccagcatataagagtcacagtcatgccacatcttctccaacaccagatttgtattttccatttagccattctgatggctgtgtagtggtagtggtgtgcttacttgatatttatctgataactagtaaagatgcgtgctttgttttatgtgcattggccatttggctatctttcatctgtgtattttctggtcaagtcttttgagaatttttctattaggtttctgtcttttatgtaatagttttttttttctttgagaccgagtctcactctgtcacccaggctggagtgcagtggtgcaatcttggctcactgcaacctccacctcccatgttcaagtgtttctcgggcctcagtctcccaggtagctgggattacaggtgtgtgccacaatgcctggctgatttttgtatttttagtagagacagcgtttcaccatgttggccagggtggtctcaaactcctgacctcaaatgatccacccaccttggcctcccaaagtgctggaattacaggcatgagcaaacgcgcctcttgggctgtcttttatgtaatgatttttgaagatttttatatattctgataatttgttggatatacatattgtagatattttctcccaccctatgtcttaacttttcattttcttaataaagtattttaagtgaacagaagttctttattttgatttcattatggttagctccctgtgtgtcctctttaagacaatttttcttgccctaaggaagttatcatatcatgaagatattttcctacattttctttgaaattgacttttgtatacagtgtgaggtagaaatcaatttttttaactgtattattcaattgacttgggtctatttattgaaaagactatacttaaccctataccattaatcacaggactatattatatatatataggtctgtttctggactgtatttgagaagcagttaattgttaaacttttctaattattttctcaagtaggatttattacatacttactatgaactaggcatcacattatgctaagcatttcaactgtatcatttcatttcaaatttcatcaaccctctatgagataggaactattattatccccgtttatagatgtgaaaatcaaacaagttgcccaagttctcctagctagtacatagcagaatgcaggtctagttgactttaaagtatggttctttactgtttcgcagagcagcctttgagggggaaaggaacgataacattttgggggttgatgggggagaagtgacggacaagagtgaggacctataaaaagatgaacaggtgaagaatgaagaggtagagtatgctaaaaacgacgtctgcaagcatcacacttttgcttggaagaggtattttaattgtttgtgtgttttgttgtagtgccaaatccccatttgaagccaacttatcatttccccaagacaatgtcattttttagtcaccccctccattttcatcaggggcacctatgttatttcagtgtcttcagttttggaggtacctttcacttctgtatcctttgtgccctatgcccaatgactcatatcttttaccacttatttcttcaactcactcttaaatgaaattttccgtttccattcccactacttcctgtactctatctatattgcctcctctttaaaacaatagtgaacatttaagtgaacatttagtgaacatttaagtcttaccatgtgccaggcagtagcctaaacactttaaatgcaacgtttaattgattctcacaagaatactgtgaagtagttactgtcattattcccattttacagaagacgatgaaaatttgaagaacattaagtgatgctcaacgccacatagctggtaaatggcagagccaggatttatatataaatttgatttcagatatctaccagtccaaaccaccactgtattatttacaatacttccctagctctaaactaatctctgcaccctagcatttaagaatgccccaaatctagctctaatctctctttctgatctttctttcactaatccttttcaaaaattcttctccagctcaagtgagctactcaaattcctctaaagaacctgtggatatttccacctctaatcctttaccgaaactcccttgccttgactgccccctcctctcatctcctctcctcttaagagctacctttaagtcatagcttaagtcccacttcctctacaaagcctttcctgcctcttactaatccctctgtctcaatttatctggtacctttcctccataaaaaaggtttctaattcttttaagtatcacaaaccaccatgggccttattgaaaggcaatatgtatggtggtcaatagcgtgagctttgggctaggtgctgtggctcacacctgtaatcccagcactttggaaggccgaggtgggagtatagcttgagctcagtagtgtgagaccagcctgagaaacatagtgagaccctgtatctacaaaaatttttttcaaatagccaggtgtggtggcagcagcctatggtccagctactaagcaggctgaggtgggaagattgcttgaacctgggagttgaggctgcagtgagccatgattgtgccactgcactctagcctgggcaacagagagataacactctctctctacctatctctctctatatatacatatatgtgtgtgtgtatatatatatatgtatatatttagtattagtactcacattgctataaagaactacctgggactgggtaatttgtaaagaaaagaggtttaattcactcgcagttctacaggctgcacaagaagcacggctggggaggcttcaggaaatttacaattgtagcggaaggtgaagaggaagcagacatgtcttacatggcaggagtaggagaaagagagcaaagagggaggtgttacacacttttaaacaaccagatttcttgaaaattctatcacaagacagcactaggcagatggtggtaaaccatgagaaaccacccccatgatccaatcacctcccattaggccccacctctaacattggggattacaattcaacataagatttggctggggacacagagccaaaccatatcacacacacacacacatatatatggtgtgagctttgaagtcacttatatttgtgccccatttgcttactcatgactctggaagtgttatataatttttttaaaaaaatctgttttcttattgtaaaatagggataataatagtacccacttcatttgttcaataaatattctgagcaactatcatgtgtctggcactgtgctgagcactggggattccacactgaaaaagagaggtatgcttcctgccattgtggagcttgcatctcagtgagggaaacagggctaaattattactgtgtatgtagctaagtgcaatggaaagtaatgtgcatattatcagtaatcctatctagtctgtgggagagatgctcatgaaaggcctttccttcacctaagttgagttttgaaggataaagaggagttagggaggcaaacagaaagggtttaagaccattccgggtggagaaaatggtaaatttgaagaggcatgcatgttgaagaaacaaagaaagcccagcgtggctccataacatcaaatgttatggaggttaagtgagacagcagatggttctggatatttatcagtatataacaaacaacctcaaagtcttagtggcttgaaacaattatacttattctgattattagtctgcaatctgggtgaggctcagtgaagttacttcatctctgctccactccatgtcagctaaagaagtagagtgacaaacccaggcagaagctctaacaccttttgcaacttagcatcagaagtgtcttagcattacttctgctatagtcactgacatgcccagattcaaagctgtggccataggtattagcttatgttagagaagtgtcagcatcatattataaaaagaacatggaaaatgcaatcttctcaaagacacacagtattagtagaatgcatattcagccaggcgcagtggctcacccctgtaatcccagcactttaggaggccaaggtgggatcacttgaggtcaggagttcgagaccagcctggccaacatggtgaaaccctgcctctactaaaaatacaaaaattagccaggcatggtggctcacacctgtagtcccagctactgggaaggctgaagcaggagaatggcttgaacccgggaggtggaggttgagctgagatggcaccactatacttcagcctgggtgatgaagtgagaccctgtctcaaaaaaagaaaagaaaagaaagaatgcacatttgttgggcgcggtggcttacgcctgtaattccagcactttgggagaccaaggtgggtggatcacctgaggtcaggagttcgagaccagcctgaccaacatggtgaaaccccatctctagtaaaaaaaaatacaaaaattagccgggaaaagaatgcacagtcatagtttatatcagaattattacttggtattatcaccaccatcatcacccaacttccctcatcctgaccacatacttaatatagtattttgttgctttgagttacatagcattggtgcacatttaaattttcatatccattgaaataacatattttataaattaggaacaacaggttcatgcatgtactagacacttggtatatgatagaatatattgttgtagttattccacacattgtctgtcttactagtcaaccttcaaggataaggagttgctgttacatacctgtaaccctgatgtctagggcagtgtcctgccgagagtaggcactgaataaatgtttgtgttttttattgttgttgagctataattgttaacttgagatttcctaagcaggtaggttttctatcctgtattatttctagttcagatcatgcaatctatgcctaatatatattttctatttactctttttcagtaactgctgtctcaaagtaaaaaatggaaatctttgcctgaatggactggtagcaacagatctgaaattcttagaaatgttggaaccagaagctacttcccacacaatccatgaagtgggggggagagagagagagagaaaagagagaaagagagagagagaaactgggtcttatagagagacagacacaagtactacccagttctcgaccctcaccaggtttgtggctttaggttctgtgcctctcttccttatgtgtaaaatgaggctaataacacagcagcacagggttgttggaagagtaaaatgaagcaacaaacaagaagatgctagggatggtagaaaaatgctaataaatgtcaaatatggatagaaaggaaattggatatgaggtataggtctgtttagttttattaacaataaaataattatatatttaatatatttaccaaaaaagaaactgcttgacaaaataattccatatactataacgtcaaattgtaaggcttcctattgctttcactttttttagtaaaagtttttattgaaatataatctgattgcattttggaataagttaatttacaataatttaatttatcttatagccttttaagatcacattcagtgcaatggataaagcagaatgtatctataatttattgtcagggttagagacttgaactgataaggatatcgttatctactgtttagggcaaaagatgtaaaatgactgtgcattaagtgccaaggttttctctaaaaagggcccactgtaaacgccagaagcgtgccagtttaattcaacaaatatttaattagcacttgtgatttccaaggcaccgttttgggtactgaggaggaagcaaaaaatgaatagctgctaatgccagcgagagacaagacatgaaccaaacaaccagactggaaagagtggggcgtcgtgatgtagaaaaggcaaagcacaggaagaacctagtggcgcttaaaataatccaacttttcctgccttttttcttcttctttttaagattctattttggatcccttttcgcatgtgccaggtcgcttgtcggcagagaatcctcaaccctgagaaatctctcctcctattctttctttcctcacaaattcgatgagctcttctgccatcagcactgcttttggaatggtatctattgtgtgggtggcgaaacgatggagagatatttttgttctaattatgagaactgttttactgggggaaggagggagaggctgatctgaagcgctgatgagctgctctgagaggatcctccgaggaggcgttactaaggttactagagagaggacggcaggtgataggcagggtaaaacaaaatatattttcaaatgagaggcgtgggctaagcagcaagagtgccagcggtactagatgccggattccctagaggggaaaggaaggagacccagggaaaaactgggagccgcggcttggcgaaagctggaagcctcttcgtccctttccgggccgtttctcccgctgcccttgtttcccggagctgttctggctgtagcacaagatcggcgcactcgggggacggtgccatttagatgtaacacgtggccgtgtcggaccggaagtggtgcccagtcgggacccgtagggagaggcgggttgcgggcggcggcggcggcggcggcggtggttgtggcgaggctgcgcggccgggcgcacgggacctgtcctgcagcggctctctcaggccgtgggtcgtcgctgcagctgccgggaaagaaggaaacgacgactccgggggcgaacttggcacacagggaggaagcgaaagggtgtgtgaggagggctgtgggtatatttggcatcagggagaaggacctcaaaacttgtttttcagatagtactagttgatcgtcgggttttttttgttttggtttggttttttttttttttttttggatgacagattctggagacacctggcatctccgtttttgagtttctctccgctcttgtcagttgattcgtagcctgaagtgagtgagagctttttagttcaaccagtgagttaagataggtatgggttggatggagcggccagcgaataaagaaatgggagagtgggagcaagaataggaagtcgtgtcctggggcgagggaaaagatgatgatgatgatgtaacatttactgggtttcactgtacaagacaccgttaaaaccctttagatgaggcaactcttttaatctccattcgtatgaggtcagccatcttactagcctctttttataaatgaggacactgaggcttggagaggttaaggaacaggcccaaagaaagacaaatgaaaagtgcagagccaagcagtgaaatctagtaggctgatcctagaatatatctctcaactccacactacagctgtcccccatcaagatgtaaagaacgtgaggacataggacaaagagtgagaggacaatatggcttgaacagatgtgataagacagctggagttgacctaaaaaagggtgtaaaatccaggtgtgtaaggcaataacagatgtaagggagggtagagttggaactcgggctttcaaaccttcatctccaaccttaactagcatcttcctatctaggattttagtggggcagagaagagaggtatatacccacacacctatgtttgaaaatggaattacagactttaaaggttatttaaagatttaaacaacttaaagattatttcatgtagctaccttatttaatagatgaagtccagggagatgaaatgacttattcaaggtagccaggactagaaacatgtcgtttaccctagatccaatgcaatgaagtttagagagttctttcctctttttccagctgcacttgctgtcgttgtattagttttaacaatttgatatatcatttaacctggactgttccttccagccatgtaaattagttacgtatgacatcaaatagtccatccttccgtcttagtgtgtgttccaaattcagtgcaaagctggaactaggagcttcttccaatacaattgagtggcaactgaggtctcccagcattttgggatgctgaggtggacggattgctcaagcccgggagtttgagaccggcttgggcaacatggcgaaaccccttatctacaaaaaaaatttttttaagtttgccaggtgtgattatgcactcctgtagtctcagctacttggagaggctgaggtgggaggattgattgagcccaggaggttgaggatgtgagccatcatggcgccacagcactccagcctgagcaatagagcgagactctccaaaaataactagataaataaaatgaaacaagagaaagctgactaatccaaagggcaaggtggtttaccttaaagaaactcaaaagaaaatggaaatctctacatatattgaaaaagattacaggaaaattttcatcaattgatgatgtactgttcacaaatactgtaattctcctggaatatagtaaatcatattccagagaggaaatttggagtaattgaaattgtgggcacaagaatcaagtacagcagattagccacttactggatttgtaaatagatttacttaactttgattacttcattcctaaatgaagataactttctaacttgcagaattagaagtgttgtttgtaaagtatttaacacaatgtctagaacaaagttggtgataaacacacagtgattattactactctgaatcaaaagtgaaggattgctaaaccttgtaagcagtcactgcagcttctaggcctggtttttcagtgaaaagatcaaagagtagccttctttgttcacctaatgataattaagggtgaaaaatgttgatgcatttcctgaaaggtatgtctcttatttaaaagcgaatgaaagttttagatggctagatggcctgtgaataggaatctgcccacaatgatcctttaaaactattgtggctgtttaagataacttatttttgaattattgtttcctggacaattggcaacatagattctaaatagctgactttgtactcctttacagatgcatggtcatggaggctatgattctgattttagtgatgatgaacactgtggagaatccagcaaaaggaaaaaaaggtaagtaattttttttattgatctatttttcacatcctttctagattaatatgaagtataaataaacgagtgaaatttttgaattgtgtttacatgtgaagacaattgctctagtgaatgaatttttgttcattaagctaatacattgattaaaaattggagaacaattgtgggaaaaataaaaattaattctgcaaaggggtttattgaaagcgaaagaagagtttcagatttctggaatcttttcagaaatcagtgaaaccttttcattacatatatttttcattcaactgtcaaggactgtttatttgcaaatgttgtagctcagaaggggcttgaatggtggtctcttgccattacttgccttcaaagtgaagttaatatggaggatgaaagtataatgcagcacagttattacgcatacatgaatgagcagactaagaggtcacgggaacaaactcaaggaaggtttttttgaattgcaagagacaaaaactcttagcacataaagcctgtgcattacaagcaggatacgtcttggtggagctgctgtgcgtaggagcattgtttttagctttcagtgcatagaaactcagttttatacgttgactcaggagtggttgactgatgtatactaaccaaacttacatggctgttgactgatttttttaagcaaatgtatagaaattggcttattatttcacactgagagcaatatattaggcatactaacagggtctgaacatttttataggatactcagtctctgcaataaaggatagtactaattataataaattacatttttgatgctttacattttctagatttttcattcaaaaatactactttgtaagaatagaatttgagcaaatctagttggatactctgctccaggattatattcatcactataactagggctgacagtctatggcagggtgtccagtcttttggctttcctgggccacatcggaagaagaattgtcttgggccacgtactacagtggagcacacacaattgtgaatctgttggttcacattgttggcctgaagcagtgctgggcctgcgtaaaatacactaatgatagccaataaggtttaaaaaaatgtgaaaaagtgtcttaatgttttaagaaagtttacaaatttgtgttgggccacattcaaagccatcctgggccacatgaggcccatgggttgggcgagctggatctgtggtttgtgttctctataatcagccctgcttttttgcgtatcattaattaccaaaaacttccttatcactatgttacagatagagaaatgaagaaacaaagagataaataattgaatcttattaagattaaggtagtaattgacagaattaggatttgaatcaggaagctaggtgatatgacactagagtccatgcttttgttagttccatcttccccgtgttataggtattaaataatgttaaggtattaattaagctatttaaggaaatgtaaaatatctcattaaagatcagtgagtcttcttaaagttaagacttacattctttaaagtatattccagttatgaaaatataaagaattagaaaataacctttgaaaaaagtgaactcttattttcttcttaatataccaggacagttgaagacgacttactgctccaaaaaccatttcagaaagaaaaacatggaaaggtggcccataaacaagttgcagcagaattgctggataggtatggtatttcagtgtcaattctatttcttggtttaagttgcttcggactaggggatttgattatgttaatttgaatataaacattttgaattttcttaaaaaaatttgttttaacagggaagaagcaagaaatagaaggtttcatctcatagctatggatgctgtatcctttttttatttccagatttttataactagtagaatattttaaaatctgcttttttgttttataaaatcttgtgaagtcaaataggcttttttatttttaaagataagtatttagtgatgtaggattttgccatttatacttttgggtacaattctcttttactaatatataggaaaaatttagagacaaaaataataaaacatattactagtactctataaataggtttataaagtacatgaatctgcaaatatattttccaaattgttttttcaagctttcaacatttccttttcctatacttatctttagtctcattttaatttattctcttcctacctggttctttgctatttaaggtctctataaaacttgtatttaaaattaggtctatccagtgtgtccctggatctaaggaaaaaatacaaataaaatgaggcctgcctgtggactgtcctcaggcctgccatggctttaatttttaggcatgacttaaagctatctttaagataaaccctgcttcctggttatagccatttgtcaactcagttttttaataagactggctgatgacactaactgctacgctggccatccatactgctgttgagaatattggagaatttaagagataccaagcaaaaactgaagtatttttgggtatttattgctgtgatcagaattgggagaaggagacagtgtcaatttgatacgccccctacctgtaatcatctgtttcactgtgctattccaatatttttcttttaagttatagaagtaccattgtgtcactaattgatttattcttcttatctcctaacccaatagctagcttttccatggatctcatctgccatttgttcctttagcatttaaacatttgctctgccttctctgacacctactgcattgggggcacctagttatagcctggtgagagtgaaaatatgggtactcttttttctggcataggaggagttggagccacagtttttttgtttgtttgttttttgttttgtgtgtgaggatttattttattttgtttttctttattttattttattacttcaaattctgggatacatgtgcagaacgtgcaggattgttacatagggtatacatgtgccatggtggtttgctgcacctatcaaccgatcaccctcacccttccccgcccaccggctccagtgtgtgatgttcccctccctgtgtccatgtgttctcattgttcagctcccatttatgggtgacaacatgtggtgtttggttttctgttcctgtgttagtttgctgaggatggtggcttccagcttcatccatgtccctgcaaaggacatgatctcattcctttttgtggttgcatagtattccatggtgtatatgtaccacattttctttatctggtctatcattgatggacatttggattggttccatgtctttgctattgtgaatagtgctgcaataaacatacatgtgcatgtatctttataatagaatgatttatattccttttggtatatacccagtaatgggattgctggatcagatgttatttctggttctagatccttgaggaattgccacactgtcttcaataatggttgaaccattttacattcccaccaacagtgtaaaagtgttcgtatttctccacagccttgctagcatctgttgtttcctgactttttaataattgcgattctgactgggagccacagttttctctgggttgtttgacaagagtagagtagtttttgtctcaaagttgtcttgctaggctgactcttggtcatttggttagagagaacaggcttttgttgacgattttttagtccgtgcctgttggtgtttccaggttgtcaccttctttacctccaattctaggatacatgagacaaaaagaaaacctagggaactcgctatcatgtcataccataggtcttcaggaggtccctagcggggcgccttcttccttccaccttttagagtctttttatgtttgatatataatgtacaaggattttagttgttgttagtatgaggaatagggagaagcacatctttgcctactccatcttcccggaagcaaaagttacacccaccacctgttcttgtacataaaattatattggaatacagccatgcttcatttatatgttgtctttggctgctttcatgctaaaatggcagaactgagcatttgcaacagagaccatatggcttgcaaagcctgaaatatttaccatctggccgtttgcagaaaatgtttgctgaccccagctctaacaggttacatgacttgccatggtcatgtgaccagttagtggtagatcaagagctagaatccagatctccaggtatttggtttttctgtctctttcttttttttttttttcctgaaatattaactggtttgttacaatatggaaataccataatctgattaaattgtctattagtacacattatgatcagttaaatcactatatatgtttaatagtcacagagaatattgtagaaggtgaggttagctattatgtgcatgtttggctctagagagagtgctgttgagctttttaaaacaaaaagtaaaatgctcatatattttgttacaatgctttgaaaaaacatggcattttattctttgaatttaaaagactataaaaattgattttttatatttgctttttttgaaagtttaatgttgggatttaatattataaaagttgcatcttctatttagaggctttatcattactaaaatagataaattatattttatgataatgaaagataaattctctacttttagaaactataattttaaaatttttcatattgtgattattagaatgagtggtggtaggaggctatatgcagttcagcaatagaataagaagctctatttctccccagatggagatatatttttatcacaagagtagtatatgcttgaaaaatagtcgaaagaaagcctgtactttacaatcttcactttcaacaatttaatatatacccttctagattttctgaatgtgtaagcatgtatagtgtgtgaatatttttaaaaagctaaatagactcatattgtgctttttttaccaccaatcagcaatatattatgacaccaaacagctcctaagagaataaaatccttaattttttgcatttcagtatcaaagacatacaaagttcgtaaatgactatattttatactatggtggcaaaaaagaagacttcaagcgtttggggtaagtatcaggaagtttacatagaagggaatgtgggttatgggaaactttaaagacccacagctactgtgccttctgattctgtcattcttccctgctttctattccggtgtgcctttttttttttttttttttttttttaagatggagtctcactctgtcgcccaggctggagaacagtggcttgatctcggctcactgcaacctgtgccgctgtggttcaagcgattctcctacctcaggctcccgagtagctgggattacaggctcctgccaccatgcctggctaatttttgtattgttagtagagacggggtttcaccatcttggccaggctggtcttgaactcgtgaccttgtgatccacctgccttggcctcccaaactgctgggattacaggcgtgagccactgcacctggccccagtttcttttttatgttataaggtagagataccatccacagctcctgagtagctcttcatgaatcccatttttttggacaggcctcaggtagactctttacctgctgagccgggcacaaccctggtgataaaagaatatctgaagaatactcatgtgtcttcttggcaaagatctttgaaataaggaaatttttataccttgatgtttgggattgctttttaaaagataggtaaacaagaactctcagtctagcatttcttgcacatcaaagtccttcccatgtttaaggctcttctatcagaacttgttttttgttttgttttgtttttgtttttttaaatttttatttttatttcaatagtttttgaggtacaggtggtttttggttgcctggataagttctttagtggtgatttctgagattttagtgcacccatcacccgagcactgtatgctatacctaaaatgtagtcttttatccctcacctcccttctggccttcccccacattgagtccctaaagtccattatatcagtcttttgcctttgcatcctcatagcttagctcccacatataaatgagaacatatgatatttgattttccattcctgagttacttcacttagaataatggcctccagctccatccaagttgctgcaaaagacatcatttcattcctttctatggctgagtagtattccatggtatatataaatggtgtgtgtatatatatatggtatatatatatatatatggtgtatatatatatggtgtgtatatatatatggtgtgtatatatatggtgtgtatatatatatatggtgtgtgtatatatatatatggtgtatatatatatatggtatatatatatatatatatggtgtatatatatatacacacaccacattttctttatccactcattggttgatgggcactttggtcggttccatagctttgcaattgcgaattgtgctgctatagtgtgtgtgtgtcttagaacttcttagttttatatgaggtttttttttccctctaacaattttctgagttggtaggactctgagaaaatttagtaccacctcatttacccccaatttatctcccctatcaatttatcctatatctcccaacaatcacttttttttccttttttttttttacccccagactgttagcattttattttgaaaggtcaatccctttggctttcttcctcctttactcagtcttctacctaggaaactagtaaaatgagatgtgaaaaacttttcatattttttaaaattaaatctcagcagggtggttggttagaatgaaacttattttcattcactttattcatttagtgtttagtcgggtttctcattctagctttggtaacttagcaccatttgtataattgaaaccaatgctacagacagattccttatccatttaacttgcttctgtagtagtatttttataagtgccttttgaaaatactgaaatatttttataaatatgtgaacaaatttatactcaccaaaaaactatcttcatgtattatatttttaataaaattttccaaaactcacagagctatttaacctaaatttgactacttttgtttttgtattaaattgaaaaagttctgttttccagggaaaatgacaagacagacttggatgttatacgagaaaatcatagattcctatggaatgaggaggacgaaatggacatgacttggtaattagccatcagaggcgtaatgcatcaaatgctttagtcctgtttctcctgttttctgagtggttttttagtcaaggtgttcagccccttcatagaacagttctgaatcaaggacataaaatcaagcctaggattatttggttcttttggtaatttttggcagttttaactgacttctcattgtttgacttagtcttcaaaaaaataacattcttttttacagtattgtgtgttatcttgtaatatgttattatatgctgctgttttggaaaaaagtcatacctgaaaatgtttttttaaatccaaacattacaaagggtaaacagtgaagagtgattctccttcttatttgtgactgtcagttctccaatttccctccctgagtgaaccacttttaatagttaatatccagatattccatgcacatgtaagtaatagttctcttaaaacattaatatttatgtagtatgtattctttgacatcacttgaaagtagcaaaccatggttgagtttctaaatgtataatatttatattttcatgggtctagggagaagagacttgctaagaaatactatgataaattatttaaggaatactgcatagcagatctcagtaaatataaagaaaataaggtatgctttccacatatttatggaaagaggttcttattcaagtaaaatattaacttttattatactgtcatgccccacattattcttttaaagatgctaattctagactcagttgtcctgtgtttatgatgtgtcatttggaccatttaacctctgcagctgtggagtttacaaaaggcctatggaaatttatgaaggacaaggatgcttttttttgtttgtgagctgaggcatgaaaagtctaaaattaaacgcaagtgggtattggatcctgtttcatcctgactctagtctagagcctctagtgattgtaatgaatgacttaactctacagaataatgtcttatttcacagatgatgtttgaaactgatagattttaaaaattgattaccatttatagagatccagatgcacatcttctattacataaatgtctattctagtaaaattaacatttcaatcagtgctaattagtaatgacagatttcctttcccactttacatcttactttagttaatatttttatttttggttgggcgtgatggctcatgcctgtaatctcagcactttgggaggctgaggcaggaagattgcttgaggccaggagttcaagaccagcctgggcaatatagtgagactttgtctccacaaaaactaaaaaaaattagccgggtgcagtggtgcatgcctatagttctagctacttgggaggctgaggttagagggttgcttgagtccaggagtttgaggctgcagtgagctatgatcgtgccactgcatttcagtgtgggtgacagtgagactctaaaaaataaaaagttatttttatttctatctcaaacatcaaattatagctggaaaagatgacccaggagcagatctcagttagaaatatgagaggagggaatgttgcataaatatgtgttatagataccgtatatttgtattaagaaaaaacctatttaaaaagctatcttgtatttatctatcatgaagatttatttgtcatttaaatcatttgatctcattagaaccagggttgatttaataattttttcagtagtgcctttaatatgtgtgttgcttcacagtttcttatagaaaatagtaataatgttcattttgtataccctatttataaacccgtgcacttaatatatccccagaactgctgtttcttatgaactagttatggactctggttcacagctgtcttctctgtaccacatctggttcaaaaagcaccacagtaattggagttacttaaagttactgtattgtaaatcaagtgtgaaaattatgtctttctaggagcatgtaacaaaggagatttttcagccctggcttattcatggattgttcttaagttgttgtttcttttctttttttcatttattttcccccacctcctaataccatcataattcttcagtatttttttgttgttgttcagtatctattgaaactggactaggtactatgggttaatacatggtgactacttttcagaaaaagctagtctagttgaggggagaaaatatacataaataaaaattaaatatttgagttctcaatttttcaaaaatggataccactagaaatcgtactttaaagaaaataatcttgaaaaaatgtgtattttcctgctagaacatgatgagtgattgtacatgagagtaaatgcagcaagaaatccgatatgactcgcagattctgaccatggatgctgagaaaaatacggaatttggaggaggattttttttgtggggggaagataatgagtttggttttggcataccatgtttgaggtgttggagaaagagtaatgcctttggttccctcactaggatgcattttctcttctctttattcatacaaagacagtgtattattcagttaattaaaaccagctcctaatatatatagtagatacttttagagcatttttagtgaatttccacctttgcctcttactcctattcctttctttattgcatttcccctttttagttggatcaatgtatcagttaggattaggtccagaaggacagagaagactccccgaaaaaaaccactggcttaaatgagctggaaagtttatttttcttatacataaaagttcaagtcgatggtcataaagtcagaatccttcttgtttactgcttgcgtacgtgacctcattgtgatgagtgcagagtgagaagaaaaggaggctcagcaccaaatcctgaataacttcagctttaatccaaactaggacatttatgtcaggaaataatatacagtctttaactagtaggatataatgtaatttgttttgttacatttattatttcctcataagattataatcttcttggtgacacactattttaataatcactttttatcctcagtggaatgccaagcccaatagttagttgcttaataagttgtctgttgaatagattaatgaatgaagaaaaaagtttggaaactattgctgttacacttggctgtgcttcagtagacatcctaacatatgttggatggcaagcaatctccacatacatatataggctgaaaaatagaattaaacagagttatcctgaaattttattttttcccctagatttggaggattttatttttgttgggttttaatcagagtattttgaaatattttgagcctttatttgcatttaaaatacaaaattgccaaattcaagtaatagattaatgatttttttaaaaaaataattgaaattgccaggcacggtggctcttgcctgtaatcccagtactttgggaggctgaggtgggaggatagcttgaggccaggagttcaaaaccagcctaggcaatatagtgagaccttgtctctataaaaaataaaattagccaggcagggtagcacatgcctgtagtcctagctattcggaaggctgaaaaaaaaaaaaaaaaaccccacaacaaactgaagttagcaaggcattgaacactttatatgaatcctctgtcttactataataatccggtgaacttaaggttgttactatttccatttttatacatgaagaggaagtagagaagttaagtaactttcccaaggttaagacctaatgagtgacaagagcttcttgagttgggtacaggtatgcatgtttctagactggagtggttttttatttgtttgttgttattttttgttgttgttgttgtagtttttgtttgtttgttttgagacaggctcttgttcagttgcccagggtggatggaatgcagtggcatgatcatggctcactgcagcctccacctcccaggttcaagtaatcttcccaagtgtattttttgtttgcttttaatttttagagcatttttaggtttacagcaaaattgagcagaaagcacagagttcccatataccccctgctctcatacatgcataacatcccctactgtcagcatcccacaccagaggggtacatttgttacaatcagtgaacctacattgatacatcattatcatttgaagtccatagcttacattagggttcactcttgctattgtacattcaactgctttgacaaatgtgtaatgacgtgtgtctaccattatagtaccatagagaatacttgcactgccctaaaaatcctctgtgctccacctgttcatcccacccttcttcctaatccctggcaactactcatcttgctacttcctccatagttatgccttttctggaatatcatatagttgaaatcatatatatgtagtcttttcagattgggttttttcactttgtaatatgtacttaagtttctccatgtcttcatggtttgatatttcttcttaccactgaataatattaattgtctggatgtaccacagttgtttatccattcacttaatgaagaacatcttggttgcttccaagtttcagcaattagaaataaagttgctgtaaacatctatatttaggttttcatgtggacattagttttcagctcatttgagtgaataccaagaagcatgattgttggagtatactagttactattctaagtgtttcatatgtattatctcatttaaacctctttaaacctctgtgagtaccaaggaagtaggtactcatatttctactttacatatatgaggaagctgaggcaaaaaagagattaatttgcccagtactatacagctgttaagtggtagagctaaaatgcaaatgtaaataatctgactccaaaggctgtacttttttgtactagaatatactacctctttactataccataacctctttttttcttgtcagtcttacagaacaggatatattatctgttaacttaggtatcttgtggcctggcacctataacttttaagctatcttaaagtagattgttcttaacagataaattggtgattgttcaatgtattttcttcaaatcctataagaagagaaaaatctgtcatgatgggaattacatttattttttaggttggtgaatgtcattgttggctccatgtttagatttctgtataatttaaatttacattggcataaatgtaatttttttattatcagtttggatttaggtggcgagtagaaaaagaagtaatttcaggaaaaggtaattctttaaaatttttactttttaataggataaacttattttgttaggttactgaattggagtcattaagatcattcctaacatatacaagaaattattatctacaaaagtaaaattagagaaggtgtattcatgatacattattagcaaaggtctgaatataatgctttaatgattattacctttatacttttgcctttagaacattcagttgaatgttctgcatatttctaagtatgtagaaaatattttacaaattaaagatttcatagcaagacaactttcaacaaaaaagaaaggtttatttttttcctttctttattaatttttggaataatgaattggtattactgtttttcagccaaatccacatttcaaaagtagaagttaaatatcactttaatcccaatagaattttggggcaggctagtactcatttttggaagtcccttatattgagcccaaatacttagtctaatagcaaaagaccagacatttggtaggcaatcagtaaatgctttttctatgcattattgtaaatctattcattaaatttttcctggaaattgtgtatctccatactgtctcttgctgtaaaattagctccttactgagtaattgcattttaagtgttaaagtactgaaaactatatagtagcactaaggaaataattttaaacttactttaaaaaatcttttaaatggaaagattacatttttaaatgattaaatatttatgctatcattgtggctcatatatatcttccataagttggctatgttaggtgtgaaattgcatatgccataaaacaacattaaggaaaaagaataaatttaaagctattttaacttttcttagggttatattttagtttatgtttttatctaaaataatgagaaatcctgaaatgtctatcacaattttaagatgtactcttattgaatgagattttcaggtgagtttataatgctaccttttaaaaaaattgatgggtagtctctaaattcatataactgaataaaggactagttaggaaagggaaagaaagctgctaatgtgatttatgtgatttcttttataaagttataattttgttgctgttttaacaacaaagccttacctactaaacatatagatttaataaaatattcatttggaatgagtttaaaaggctgatttagaaataagtctttttaggatataattttctaaattcattttgataatttcttaatttttatgaaaaagatttgctggttacagatttgcttctgttagtgcaaattattgtgatataaattaataagagtttgatcttgtctttttgccaaagtaaattactgttgagttgtttctctttttttctctcaggttatcagttagtctttttttggaggttttcatatattgtggacatggtaatgtgtgtgatgttaataatagtgtcaagttattctaaaatttagagtatcaggtttgactgcgtattgtacttcacctcaaagtgctagaatttttaaatgtgttttcaaggccatctatgctagtatttaaaataaatgtcattatgctaatacttaaaactattaactattattaccattaaatattgaaaggtttcacccagctataagtgtgtgtactttggaaagtgcgtttttttgggggggggtatttgtgagtatgttgttttttttgtttttgtttttttatttgtttttccttaaaccaactttctgagaaatatgtccattctttaataccgtctttccaaagtgtaagattccctaataaggagtcgctaaaatgtctatctaaatacagtctatcaagcaagaattctgtgactgatttttttggtaacagtactttgatttgatacttgtatacaagttggttgaacatattactctggtcagtttttaaaggctgactatggttaatttgcatattttagaagtacattttaggggtaatactagatcatatagataaatattgtcaccaactaccatagctaatattcctttcctttctgcaggtcaatttttctgtggaaataaatattgtgataaaaaagaaggcttaaagagttgggaagttaattttggttatattgagcatggtgagaagagaaatgcacttgttaaattaagtaagttgattttagggggtatatgattgattcttccaagtttgtctttaatttaaaaatatatagactttaaaattcaaatacaatttttaacatatctttctggaagtgctcttttttcttggagcttcccaaagtcccaaagaactttttagcctcaattttttacatttttagcattacagtggtgtttcagtaaaaagaattctaatgtcaaatgtaaactggtaatttgtagagtggggctctgtccccattaacttgagaatgccaccacattacatagctaagaggcacagtatcagaaaaggcagtgtaatctcacattagctgattactcagtgatatcgttgtagcacagataataaataaattcactctgtttcacagtattaataaagaaaaactttaggaaggcataattgttcttgacctcagtcttaaaaccatagggaataaatactccagaatacagcagtttcccttaggatgcatgttttagagtctgtcattcttttatttattttttaagttagtcttcatgtgtcagctgttcctctccctcatcatattattgcctttagccttctctgggtcctaagtaaatgtgccttcagagttttctgctcatacctaataaaagtcaagaatgtccccacatgctacgtatgcacgtcaatacagactgatttctgagttccttctggaagtgctcaagaggaaaagtcagccagtgtgaactgagattaaggcaaaaaaaaaaaaaaaaaagagaccacaattatggaactatttgaaaagctcctttgcatttgaaagttcttagagcacttcagaggaaatgactatactcacattattattagatatctttgatgtgagacacatgttaatgtgcctgtggaacacagtttgtttttggaacaaattgacaacacatttttctaaaatagtgttattttcaattcctcaagctaatatttttattatatgtatgtgtgtatatatttgcatttttgaggtgagaaggtcagattgttttctttagattgtttgtttaccctcttatagtaatggaatataaagaaagtgcgaatttatgatattaaaagtagattagcagtgtggttattcaaaatcagccattcagtggtgtcttttctttttagggttatgccaagaatgttccattaaattaaatttccatcacaggtaatgtcttttaaaatgccattcttaatgtttagtaatccaggatatagtcatttacctgcactaagtatctaaatgtagacttaggtggttgatggttgaattggttgatcatgtagaaaatctggcattgtcgtatggctacataaacgaggggtttagaagtccgctatgccctattcttgccaagcagttttaaatgtaaaggcctatgtgaggtggtagatggatgttagaatttttagtttggagccaatgttctgacactttaatattagaaattatgttgtaaagcagacttcataaagcagttcttgtgtctcacttagacagtgttttagctggagtttgccattcttacaaaggattagacacctctatactcattttaaatgttaaaatcaaggacaggcgcggtggctcatgcctgtaatcctagcacttggggaggccagtttgggtggatcacttgaggtcagaagttcgagaccagcctgaccaacatggtaaaaccctgtctctactgaaaatacagaaattaactgggcgtggtggcaggtgcctgtaatcccagctactggggaggctgaggcaggagaattgcttgaacctgggaggcagaggttgcagtgagccaagattgagccactgcattccagcctagcaacagagcaaaactctgtctcaaaaaaaaaaaaaagttaaaatcaggcttttattgaatgagctttaaatgtatctgccacattgaatgtgtgggaataccagtgtcctgcagttatggggtttgaaatcagacctcagtttttaatctcagcttctccgcttactaggcttcttcttgggcaaactgcttaacctctgtaaggcttaattttatcacctgtaaaaatgaggctactcaggctattgtggggaataaatgaaagtgcatgtaaagtgcttgccacagtacctggcattaaagatgttcacactgattcttcgcaacttgcctttgtgatggtcaggttttatgcgctggataacagttaaaagttcagcttttgcaactttgtaaaatgtatacataagcatattaattttaaaatagctttcttttttttcaagcaatcacatgggttgtcaaaaaataacagctttgttataaatgtgcctatatagtattttagctgttaaaaataaatgttaaataatatttttaattcttaaaattagcaggattatttttattattttcattattctttatttttttgagacaaggtctcactctgttgcctaggctgaagcacagtggtgtgatcatggctcattgcagcctcagcctcctgggctcaagtgatcctcacacctcagcctccagaatagctgagactacaggagtacatcaccacacctggataatttttttttaaagtttttgtagagatggtgtttccctatgtttcccaggctggtctcaaactcctggactcaagcagtcctcctgcctcagccgcccaaagtgctgggatgataggcataagcctccacacttggccagaacttttttggattactggaatagcctaaacctttatttccccttcccatcagtgatactgaaagaaagcagggatttgttttgaccttgacttttgagcttcatttcaaaatggaaatgattcttacaaaatatgcaaaagtggttaatgcattaaatactattatagcatttggtagatgtactttaacttggaaaatctactgaacaagttttttgaaagtaatcttttcctttgtctctattctccttgccagtcccaatttcagcattatcactttttcccatttagtatttcttttcttaacctattaaaattaattaattgtttgccaaccttgtaaacctgccctagaagagataaagctgcaacaataagagtataaattataagtggcctgatgttgatatatgaattaacaataagccctttccattttcattccattatgcttctactatattcctttattcttaagagtagaaatttctatttactggtggcttagagctgttcagcagtttcttcttatttgtgtttttttaacatgtaggtggatatggattatgtgaagggaaatgaggctttttttttgtaatttagttttaaatggctaagtgatagaatatagaaagaaagaaacaaatacaattataatttgtatttactatggtcgtatacagaacttatagaaaataattatttgtgtcagtgttaagacttcattatcttatagaatgattttaattaatatacaagcataaaatatttacagtctcacttaacgttccttattatataaatcacatttaaaaaataagtattttaactgattttggttttttgttcatatgatggttatttttgaaaaggtcagttggaaaagttaactttaattttatatcgtttaacacaaaggagaaaagaaatcaagtcaaaaaaaagaaaagataaaaccaaaaaagattgtgaagagtcatcacataaaaaatccagattatcttctgcagaagaggcctccaagaaaaaagataaaggtaaaaggaaattaagataaggcatctactcacatttgtgagcatgaaatataatctgccatatttcattcatctaattgatgaatgcattgagaatttcattttatggtagttgagaggaaactggctgagaatttagatatgaacttaaagtgacttacaggagttttaagaactcctctaaattaattaagggttaattttagttcatttttggcagatagtataatattgccaacagttttctaattcctggctttgtcacctacagacttgttactttgcatcagtcactgaactgctttatttttcttatgtgtataggggtgaggtgcatacctggccttcatactggtcaagcttattgtggaaactcaaataagaatgtgaaagggactttgatcagtgcctttaaacagtctataatctataaatcaatataaaattgtaacactgattttatttataatggcctatgtgactttttttactagtttatgagtttctagaaatgagaaagattgtcatatatctgtgttctcagagcctagcatggtgctgtgcacatatacttagaactgcctgctttttctttagcagtccttaagctcgctaagactcaatttcttcatgtgtaaaatggtcttgattccttttagaattgttcagaagttgaaacgagataattcattaagcagtttgcatagtacttggcacatattagctattatgaaggttacttctagttgctttttttagcccataataaagtagagtcaatcggctgtaatttatagtgaatcagactaatctagataggtaattgaattagattcaagccaatgttaatataatatttggacaggagagggctctcttgctccagctgtgaagatcattagctatgttgcatgcttagaagcatttacttcttcttgcacatggtaatatattcgttatgtagcagagtttaaatctatgtgcccttgtgatactgtctactcccatagcttcaagtatatggtgtcaccaacctttagacttcgtaaaattgatagatggtgagaggaagatattgttattttattgcttattgagagatggcatttgtagcagaatgccttttttgtctctatcttaattattttccactctaaggtaaattttaaccaataaatgttaaaaatatgttttgagttttaaaaacttatttatccttatatgctagtaaaacatttaatatgtcacttaagaaatttgttgccctcattgtattatatgttcattcttatcacaactgtgataccatgttaatcactgcgtattccaaatgaaagaactagtctctactttataaaatgttactcagtacaatcaaagtagatcaggtagatgaatgctcaggttcagggctgaggttggacccttcgtattatgcgtacatatgcacatgatcttccttatagacatttttcccttagtgttctgtcagtagatgacacctatgttgacctaaaaactaatatcagaaatctggggattatccttgatactttctttccccttattatttatgtttaatttgtcaccaagtcctgtgaattttacccccagagtatatatttctcaagttctctccaccctactacaaaccactatattttctcttataggctactgttgtattctccttacgggttccgcctctgtcttgccatcccaccttccctcctcttaatccattctccataaatcaatgatttcctgttgtttttaggctgataagcaaaatcctggacaaagctaaaaggttctctgtgatccagaacttgtgtactatacaaggcttgtttctcaccactccgtacctcacgttcacactccccccatgtagcctttcagtttctggaaaatgtcaagcctctttcaattttaggggttacatggatgctgtgtcttctcttcctaaaactctcagttctatcccagctcatccttcaggtctaagctcttaaatgtcatttccaaggatcctttcctgatttcatcccccaccttgaatctaaattaggactctcatttgtaatgctgtcatggctcctgacactttccattattacacatatgacgatgtaaaagccaaagagaggcagagattctgcctgctttgttcattgctatatccccagcaccccactagctcatgttcagcataaataataatgagtaaaggactttgaagattcttcagggatagaagaccaaagcaaggtggaattgagacatctctttcttatgtattctctatttagagtgcctttgaaagcaaagtctctagaaatatagcttttttacccccaacttctatggtatataacagaaaataacaaaattttagcaaacttttaggaaaaccatgtggaactctttaatatcttatctgggatcatctagaattagctttatcattgatttgattctttcttgccaaaccaccttaatttggaccagacttgaagagtaattaataaacgcttaacatctcagctgcgtttggactgttgacaacttcctttaattttatttctatctttctggcctctctttagctaatgctttttttttttgtaaggcagggtcttcttgttctgtcacccaggccccaggctggagtgctggaatacagtggcataatcttggctcactgcagcaggcttaacctcggaggcccatgtgatcctcctttctcagcctcccaggtaactgggactacaggcctgcactaccatactcagctaattttgttgttgttgttgttgttgcagagacagggtcttgctgtttcccagactggtctcaaactcctggcctcaagcaattctctcaccttggccccccaaagtgctgggattaccagcatgagtcatcacacccgacctccttagctgcttttaactgaagttccttctcagtcttacatttagctgttagagttcctcggggctcttacctagatttctctagtttctctctgtactcccagtgtaatcccatcaactctcatagctttaggttaccgtcttagaaaatgttaaataagtaatagatggatgaactagatagctgaatgaatggatagagagaaaaaataagaaagatcagtagctgactttaaggaccagtctgctttggcaggtatgaggagaacaagatatttaggtagactgtcttgggaaaatgttcagaatcttatctgtctcaccatcacccctttcccaaaagctacgtcatccttcaggtttctgcttagctcaattccttggaaaggcccttcctgacacccttctcctcacttctccaaataagattatgttcctcttacatattccaataatacctgtcacttctcctttagaaatacatagtatccttggaataaattgtttattttctgtaagggaagggactgtgtgacatgtttacttcgttatctctaattcctaatagtgcttgctcccatagtaggcattcaataagtgtaggtgagtgaatcagtgaattcaaccacattttctgaaagttgaaaggaacttcagagatcagtcctggaatcacgactgaaaggatattctttaattttgcttttcaaagtaaagtcctctgggcagcatttaggaacttgttagcaactcacaatctcagacccttccagatctactaacaagttcccagggcgaatcatattcactaaagtttgagagaggcactgctgtatattatgtggttgttctgcattggttcaacatttccagggaaaaggaacccactactatcaaaaataaagctttacattttcaggtagttgtatttgctagcacgtttctcttaacattcagccaaaatctacagcttcctccctttggttctaattatgttcttgggcctccaaattaagcctaacatcttttttacctacggacctttggatattgggaagcaggtatcatgttcctcattagaggatgacaggaaagaatacatttcctgtttccttaccctgtagttcttatactcttcatctggtctaaaggggccaaaaactttgggttacgaggcctcctatccaggaacattggaggaattgttactgtccatctgtcacctgcccttttttactttatcatccttcagaaatattttccctgaggtcttattgcaggaagctctgtatcgtggtgattttttttttaaattacactgaccggtcttcagtgcctttctctctctgtttctctcactggatgaccattgtagagctgagaatttttgttttatgacataattgtgttgtgttcttatcagtttctgagaactaatacttacctacatatatgactttagaaaagatactgtaaaaagcaagtatttatttgtaaactgctttcaaatgttgaacatctctatagataataaattattgcttatattgcagctaattatctgtgaggttttctttttagcaatatgagattttttttgcgggtattcattattttttgttttgtgctggctattacagaccatatgagcacataagatatgatctctgcctaaaagaacgtaacattttaatgaaggagataagactaaggaacatgaaagattagaaaacagcgaagtgcttatctgtaagactataagcaaactagaatattgctaagaattctggttatagctacaatgattgcactattacaagatgatagttaataaatcaatgatgtttccttttcaggacattcatcttcaaagaaatctgaagattctctacttagtaagtaacaagtgtttatttaataaaaatatgcatttgaggtatttgcaatttagatttcccatgaatcgtgtcttgctgtgatgtgaattattttttgtttttgttaattatttttgtacatgagaaaaactgtagaaaaaaggccaaaagtgtataggatttattccccaattaagggcattaagaagtttcttattttaagtatagagagcattaaaaatttttccagtaaatacaatggatatatctttcaatttcatgttataaaatgtgaaggaagaaagataaagggatgaggttgaaatggatttaaattaggcctatggttttcactagcttggatcaaaacagattggatttcgttgagtatttgctgcaaattttattattttttccctgcaatattccaaaaagtattcacaatgacttataaaaacatacacaataagtttttttaaggttaaaaaagtcagaataatggaaaaataaggtagaatagcaatgtaaagctacaggtgaaatttatacacacaaatgtattccaaaaagtcctgcataattgcagagatagatcacagatttgtcagtgttcttcctaacaaccaaacctaagagtgaaaccagcaatagaaagattaattgtacccataagataataatgagaactcctggagtgttcagctttttgctggcagttttgagagaagagtcttctatgggtttataaaagggtacacccatttgtgtcataacaaacagtagctttgaatctaaacagtaatataatgttgaattttttaaagacttgtagtaggctcaaggcctaataataaggtgtagttcaatagcatatctaattcattttatactctctggacttatctcatagaaatttagaaacttgagatttctaggcttacttagttattttattttatttttttggagacggagtcatgctctttcacccaggttggagtgcagtggcgcgatctcagctgactgcagcctctgcttcccaggttcaagtgattctcctgcctcagcctcccaagtcgccgggactgcaggcacccatcactatgcccagctaatttttgtatatttagtagagatggggtttcaccatgttggccaggctggtcttgaactcctgaccttgtgatctgcctgccttggcctcccaaagtgctgggattacaggcgtgagccaccacgcctggtcacttggttatttataaacctaagaattaagaaaacaatttttatgactttaaaataatatttattgtggcaaacccagggaaaaaagtttgatgattattctaaatttcaaaactcaaatataaacattatttgcatttagtataattcttaacaagaaattttaaatattcaatgatcagaaattttgcactgagaaaaatagaaatgttaagatatttgttgtttaaaaatttagcagagagggagatgttgatggaggtatccctttcttaggaatatagtatattccttatcattattttgcttgtaccaactttgttttcaacatatttgaagtgtcttaaagcactgactctttctctccacgtaaattctaatttatcaggaggtcctttcctaaattaggtaaaatgtagtgacagtttcgaaaatacattcaagtataagaccagtggaccaatgttatctcaggatgaaatcatagatacatacttcaacaaaggtgtacacaggctaaagtgggagagtgtattttagttttcatccatttccaataatgagaggtgtgaatgcttatgcaatatagaaaaaattcccctttttcagttctaattttttatccttaaaaagtcttttggggcaaattcttgaatcactgatttatattattcttttatttcttctgcctgccttctccttcccactgtctttcacccctgcgctttgaatccttccctgcttcctagaaatagcccttaatgctcttttacctctcctcagctaagtcaaatttttactagtagaagcagggtgaatactgtgaagactatatccaatctgagaaacccctagctaatttgatcttgaaaaaacaaactatccacttcaagctgacctgctgtttggcagccggaacgctatttaccatagcaagcatgaaacatatacattgttatggtatgccaaccccagatatcctctcaggcggtcagtcatctgtattacatggtcttggcaatttcagacctcacattttgctctttatttccatttggacaatactcagttaccttcttaacccatttgacatctggattattaaaaccaaatccatggagagaaactcaatttctgttgggacagtaacaagtgctttagatatgttacctcatttaatcttaataatgtgcatataatatcctcattttgtagatgagaaaaatcaagacctagagaatgtctttaaatgaatgaagaaactcaatttttaaatatatatatatttaaagtatacaacttgatgatttgctgccctcttaacaaatttcaagtattgttatctttagtcaccttgcacatgagatcgcccaagaaccaaagaattgaagtaaagtgcccaaggtcaaatagttaatggcaaagctgggattaaacataagtttataattccaaagtctatgccctttacctgtatcatcaatcaataactgttcatcagtgaaatcaactgtatgtctattctttatacctcagttttggcatatgcattgtacagatccacattaaatgatttgatctatgtttcacttctgtctgtaaaatgggtataaagagacctacttcattggattattatcagaatcaaatgagaaaacatacatgtaaagtatgtgcctgacgcaaagtaagtccttgataacctgtagctatcattgttatcagagaaaagaaaaatacagacatataaatcctgtgtttgttctctagaattgatgaaatcaaaagttaagtctataaaaatctgacctgtccatttgttaccatgattgttggaggcatttgccatttcttaagtagtgcaaattattagttaccatataatatccacaaaaaccaagatgatagacctactttcattattcaaaacatgtaggaaaaattgtatataattttaggcaccacactctaaagggaacattgaaaacttgaagcaggtcaagaagaaaaaaactgaggtatggagaaaacttgaaattatactgtaggaagaatgttggaggaactgcagatgtttacctgggagaagagtgaaaggatgggagggaagagatgaggaagtagacatggaaattactgtatggatatttgcaaggctgctactatgtaggagacttattttttatgactctgggttggcagaactgcccaaagacagatttttgccttaatttaaggaaaaacttgtcccttagaactgtctgacaaaaggaatggagaaatgggctgcctctggagtagcgagtgttccagcatggattggattggcacttattggaggtgttgcagtgaaggttcattcattggataagtgttggattaaatgacctccagattcccctttcaactcagaaagtcagtgacttaaattctgatccctacttaccaataattactgaatagatttgacagtgatgcattcttttgtgttgcctgttcttccaattgttatttccttagtaacactcctcccgcccctggcaggttgtaacagttacgatagcaatgatttgtagtgactaccaaccctcagggaaccaggatactatagattcatagggttataagggaccttaaaggtcatttagtccagtcttgtagacttgattctctagggatatctggccacttttttagtgggtattttttaagacagttagtttataatgttcctctaaactgacttgattttttagtaaaattgactggtatcagaaaactggtgtaagaaagctggcatgtgggaagtactcttggaagggaacaagataacagctgtccacttgtaaaggccttgtaggtttcgttctctggcatcattaacattagcagagtaatacaatagtaataaccttgctaggcctaattaatttttctctgcttagtttatctcatattaatgagttttcataaaaataagagaagattttaattcttttttttccctcacattatcaatttgggacactggccattccagtgatggctgtcattgagtcaggaatcttgttttcaagattaaaattttatcatttgtatgtagatcattagaatacaaaatgccctcccccacttttgccatttttgctagaattggtgtcagaatagattcagttaggagcaaagttcagacacacatgttgattcagggatcagagtccaacaggtaaaaggctagaaccaccgtaacaaatcaatgctgttttatttttatgttgtgtttaactaaaggacattctgtattgacaggccacatttgtgccatttcttttttagactaataatcattattggagaggagttgtctgctaatgtaactactttgtgggttatagtgttattgtctgataattttgcagtatttttaaatttttagttgactaatacaggtgatttatttgaaacatatctattttgtcatctttaataaaatgtctttattgtttttactgattttgaaggtaattcatgctcattgtttaaaatacaaacaatttgaaaatgtttaaaatagaaagtaaaagtattccaggcccacaggtaatataatcactgttaaatttggttggcttttgcaaacttacaatacatatataaaattacatgtatgtatataatgtgcatatgtttttaacatatctattatactatgcatactttttgtaactttttaaaaatttgatatagaatggacatttttctattgcagtacatacagatatgctaatgtttttaaacagctgtatagtatttatttaaccagtccttaatccctaattggtggggaattaggttttttgttgttgttgttatacagtgtgcatctttgtacatatgtatcagaggtgcttatttatgtatgtaagtaatcaaattcctaaaagcagcattgctggtcaaagggtatgtgttttaaactgatctatattgccagatttttctccagaaaaaggtttacagaattttcactcccagcaatgtgtgagaatgccagtttcttccctgaaacaggcttcttctcattatgtaatcagcattggttttttaaaatgtctcacaatttttttttaaataatttaactagctggtcttacatactagctcagttcttaaggtactaatcctaatgtaaacatgttctctacaaatgtaaatcttaacttgcgtgtcttctgtgtaaccaagaaaaagaagaaactagatcagagacaactatattgcaagagataattgacttataagagttaatattggaattgctactttaactcagtgtaacttagagaagtttcgatgagacttaaaatccttggcctttttgctgagattctttggtaacccttggcttatttatatatgttttaaaagaatttattgtacctgtgagagtgaattaaatttctagagagccataaaagttgaagctgagttaaataaaaagttaattgtattggcgaataattcaaaatgtgctttaagtataataggtttttaaaaatcatcttttttaaatgaacaggaaactctgatgaggaagaaagtgcttcagaatctgaactttggaagggtccactaccagagacagatgaaaaatcacagtaagtgctgatattaatagagaatatgtaccttttcaatcagtttaggaagctataaccacagctttattaatggaaaaatacaacatcatggtgatctatttaatgccaaggactgcctagcctggtaagattagagcttattcccagccattgtcataagcagccaacacatccagcttcctcctggtaaataaatctttcatcagttcactttaacagatgaacctctggtccttgcttggatttcttcagagatggctgtttcctaagcttccagagaagcctattccatcatactgtgattatcataaacctatgcaagggaatcccttgcatgggaagtacacttccatactgctatcccactggtcttttaaaaagtaaaataataatatttactgttacaaatacataatatatttactatgctcagtgtagtaaaaaaactacagcctaaggagatttacccaattccccttagttattccccaatataacttaggcttacatttttccttaaaaatagtttcttttttattcacttcttgagcagactataatttaaaatgagaatgaacagagaagttataaagtaagcccacaaagtaaagagaaggaatgacatttcacaagtatttcaaagcaaaattttaggtaatacatttagggagaggtgccaacatatgaaatatttttattttaatcaatctgggtatagttatgattattctagaaactaagaattatttgatggctgaatcatggcaatatattgatatatagcagaatcagccaatacgttggcttattttatttttattaatctcatataatgtatcatgtagtaatttttttaccctaattattgatcttaatatgtatgctttttttttttaaatagggaagaagaatttgatgagtattttcaggatttgtttctatgagacgagagagagaagcctccgctccttaatgtgaaacttcatgaagttttaaacttcatacaatttgaaattccatataagtttttatctgcaagttacagcttgtgtggtttgtctttggaaataaaagtccaggttctctcagaatgtcagaggctttggaagtttattagttcaattaaagactttcctgtcctttaaatatcttttcaattgcttatctacaattctgttttatttgtagctcctagaggatagagctggacagattccattgttcctacattttgtaggttttttttcactgccttccttatgtatcttctcttgccttcattattttattttattatttcttctttttctttttttttagagccaccaatactggatttgtttgtttttcatttttttcttttgtagaaacggagtcctcctgtgttgcccaggctggtattcaaactcctggccttatgcattcctcccaccctggcctcccagagtgctgggattacaggtgtgagccaccatgctctgccaattattttaaattactaggattaaagtatattatgtatgtctttaacttctttctttcccattgataaactggcacccttcttttaagtacctgttctcccattaccacctatttccagctgctttttgaggttttttgcttgcctgtctcttgcttccttcttaacctctaccacttaagagagtttgttataatcaaatttgacttcctagcctgtggataatttactattaagtaaattattaccacagggagccagtgaggtcctagtagtctaaaacagttcatgtgttcacaaaaattgcctccccggcagagattatgcagtaagataatttaactgaataatactatgtgcatgtatcttgcctcagatatactcatgcaaatatgaatatacctctgatatggtttggctctgtgtccccacccaaatctcatcttgaatgtgtactcccataattcccacattttatgggagggatccagtgagagagaatttgaatcaagggggcggtttcccccatattgttcttgtgatagtgaataagtctcacaagatctgatggttttatcaggggcttctgcttttgcatccttctcattttcttttgctgctgccatgtaagaagtgccttttgcctcccaccatgattctgaggctttctcagccatgtggaactgtaagtccaattaaacctctttttcttccccaatctctggtatgtctttatcagcagtgtgaaaatggactaatagaacttctatgcagaaatataaaatgtaacttcttaacataaggtcctagtcgcaagggtctatggaggtgcttcaggagatccaagcctttttagaatctgtgcaaacttctgtgtatgttttttggaggaaaagtccataaatttcaaattttcaaaaatcagattttcaaaaggatttattgatttctgaaaactagcaaagatctgcttttataaagagcaaatagatggatagatataggagaagatgcttgacttgatgaataagagaaaggacatatagaaaatgaactgaacataagcaggtattttattgaagatatactattttaaataacatttaaacacggaatgattggcaataaactgcaaaatgagtaatttggtatcattttaaaatggttattatcagagattttccttttattaaacagttattcattaattccacaaatatttatcaggcttctattatatgtgatgtactgagctgggcatggctgtaaaggaaccatctaggaagtaattatgcaatcatttctgaacctgtttcagaaaagtaaatcagtgttgggtttatcagtgtttaacattgtttgatagtcccctcacttcttgaataaattgttttttttcacctcactacttgtagtgtgtaaaaatgaatctatatttctggggaaaaagtgtttgaaatgtccagccgcaagactgatattagtagtagaatatatgcagttaaacattcttatggtaaaaatatgtccattgtttagtggttgtcagaaagtaaaattcctgcaaaattaaaattaggaatttaactaggaagaatatctaaagaccctttaaaaatagatcagtgtatttggtatttcaagtagctttatgacatcaggctcatttataaatttatataaaatcacaatacttaatccatgcatacacagtgacagataatgggagttatgtttttaaggagtcttgaaaaggcctctaacatgatgagtttaaaaagtaattctcctacatacctatctcaaactttgctatagtgcggtcagcggtggtcagcagaccactggtcggggggtgttgaagttaggccttcttatacttgctcttaggcagagttcatgtatttggcagaccttcagtggtggacatctccaccctcaatacaatttctggtgactaaggaggggaagttgtttgagctgactgatgttttggggtctaaaattacatagggctaaaggaataacgtttcttacgtggtttttaaaataatagtgcttctggaagtggagtttcaaaattattttaagcaatggaaataagggagcatgcatcacttagctaagttgattactttaataaacaatactcatttgagtgtacatatgacttactgtcataccttatttatatctgtttgttgtaacatttattcacatagtattcattcatattactgagtgcctaccttgtgccaggcactgctctaggtgccgagatagagctgtgaacaaaacagacaaaatagacaaaatctttcctcataaattttacattctaatgtgagagaagcagtctgacaattctaagtacctaactgataaaaataaatggcgattcatttcttggctgctcaaaattgaacattatcttgtctattacaaaatatataggttcattgatgttcaattctttagaatatagatagcttgtgacaaaaaaaaatctatgataaaatatatggcataactatattattctattttctaattttatctatgattatagataagtaaaagaaagaagaaatcttaaatttctcgaatatccagacagacatataccatgcagtcgaagtagttgattgcccttagtttgtcttaacaatttaatatttagaatgcctggtaggtctattaatcatttttagaaagtcatcttggttgaagtttttctgtactatttttgataaggttcttgcataatccaatcacatgcttcttaatgcataatattcattagctgctttaacttgcattatgattatccagttagaatcttgtgcattgataatctttttaatgaaaagaatagttctgaactgtaaaaaatattcttagttacacccaaaataattgatttcaaactttgaaggaggagtgtaggtcaaaggcatagttttaataaatattgccaaaaaatagtttggtcttcatcattctattatcaagggtaaaagtagagaaaagagataagcatttcagatggaatgacgttgaataaaatgacatcattattttctatatcatatttacaacattatacattctatactgcatttactcttttattaagacgttgagagattttagttcggggagtggcttgaggtatgaatcacagttacgaatgttatgggtgaattgtgtctcccccacccctcacccatttcatatatttaagccccaatccccagtacctcagaatgtgactgtatttggagataaggccattaacgaggtaattaagactaaaatgaggtcacatgggtaggccctaatccagtcctactggagtccttataagaaaaggagattaggacacagacacacagagggaagaccatgtgaagacacagggagaagatggccatctgcaaaccaagttgagaggcctcccaagaaaccaaccctgccaactccttgatcttgaacttccagcccccaggactttgagaaaatacatttctattggttaagcacccagtctgtggtactttgttatagcagccttagcaaataaatacaattaatgttttaaaaaagaatttgtgactagtttcaggattgcatattttttaatttaaaataaattggcaccaaaaatgtacctatttttgtcatattttgcacttttgttgaactttattttgcccctgggatttttgggctagcaatatatattttcttcatagtcacagggtagtttttctgaagatcctgttacttgatgatttgttgaagttcttttgaatgttttctggttttcttcaaaggtaaaatgatatttgaagtttagaccagttagataatattacaacattaaacatgttttggactttttgtcattaccacctcctgaatcttcagcagctagtaaaatcaaggaaagcaatattattaggagttagtggatatacagtgtttttattctaacactcccataatagtagtgtcaactttgtagactaattagtcattttaacctagcaagtactgtgggtttgaccatgtaaaaacttgaattaatattcagagttggtccattcaaaaaataaaatctgggttaggtgcagtggctcctgcctgtaatcccagcactttgggaggctgaggcgggtggatcccttgagattaggagtgcaagaccagcctggtcaatatggtgaaaccctgcctctactaaaaatataaaaattagctgagtgtggtggcatgtgcctgtaatcccagctactcaggaggctgaggtgggagaatctcttgaatctgggaggcacaggttgcaatgaactgagatcatgccattgcactccagcctgggcgacagagtgagtgagactccgtctcaaaaaaataaattaaataaataaaaaacagaatctgatcaatggttggccagttaacatcttagtttctcactgagacaatgcagtctggaaatctgagcttgatgcacaaagctccatgcctggtgatagaaaataatgatcttagtccacaaagaattctctatgtagtagcaaaaaaactcagaagtaaatttttgtgcaaataaaatatagatccgtatccaatgtcacttaaaggacctgatcatctcttcataataaagttgagataaaggttaaatctaatagtactaagaaataccctcacttttcacttgcttggtaaaaatcacttattgttttgaaatgcaaatcatatcttaccttaaatctctcaaatgacccatgaacatttttagcccagccttcaaggcaatacagtatctggcagctacctgcactaccagcttcatatgtacttcgcactctttactctctaactccagctatatcagcttaaaaatttttcaattgcaccaagcttattcctactccaagcctttgtacctattttcttactcttcctccccattgcctgctttctgtggttagcgtaagcattcttcaggaaagccttctccatggcccatgtgcacactagtgctttcttcgagatcgttaattgtgcattggttcacagtgtttagttcccccaccaaatggtaaactgctcaagataaaggatcccatctttccccagggcctgcctaacacagggctttatacagagaagacatctgataaatacataagtgaatggatatcaaggagtcaaaaactcctgcttttattctgaaggacatccttaactttgttaagaaaaatattttctcctatgaattatttaaaatttcactaaatgcaatagagccacctaaaaggaacatgtcagggcctttccacatggagatgatttctttgttaagcaataacaattgcttacaaaaccttcagagtgataaactttcaagacagaaattagcattccactttcaaaatgatgtttgggccatttgatgaactaatagttaatcctaagcattttaagaatccaaaaacaacattaaacttgacaaagtgactttaggaatagaaatttcatgccagaaaaaaaatggcacaggaatctcatgccagaaaaacatctcccaatgtggagacatttgggagaccggcaatctcagccttactctacacgtagggcttccttaagctgaagatctgtaaaaccacctcattacatggagaagaatattaaactcagcgaggttaagcaagctgcccaaggtctcacagctaatgtacaatgttgggacaaaaacttttttctcacctaaatctaatcccccagattctgtggtttacatattatccctaagcatccagtgttctgcagaggagccaccttctagcaagatgaagaagcctagctccaacctctacttcaactggaccggtcaattcgatctggagttatacataagatgttgtctgtggcagggccagggggacctgaaaaccactaatcggcctgttaaaatgatcagtctgcaccagtaaagcaggttttctgtttgtagtaactctttatggctttgtcacatgccattaagctcagcctagcttctggctacattacagggagcaaaaacagagcccatctaacctttttcggctcctccttcttgcttttttgcctcctcttcaatgaccttcatctttgcatcatactcatcagctagtgatttccattctactctgttattctgaagaccactcagcataggtgtgatttctttgtgaaaccgtgagaactcctaaaaggaattttaggtcagaaactacataaatcatacagttaattttcaggatctttcatatgcagagaatgagctgtaaggaattgttacagcactcagagctgctaggataagtttaaccacgggcctatgaagtttgggaaagagacacgtgctgtctttactgcctgcctaaggaagtgttcagttcgctcacatctgagttgcctccttttattccagccctgaataagattagggtaaaacctcaaactgctttggagaaacagtgacaccccaatggctttccatatgggtgacttctaaattttggtgacagtttgaaagaaaatttctcatccaagtgtttatgtatttaattcaaataatttgcttacttaccttatatacaaaagtacaaacaaaatcaataaatccaacttgaagtttaggtaattcatctcttttgtttctgtccatcataggctagaaagagaaataaatcctttaagacaggtttctaagatgtatgaacaaaacagactgatttgtcctgataactttttttttttttttttgagacagagtctcactccgtctccagtctgggtgcagtgccacgatctcggctcactgcagccttcgccttctgagttcaagtgattctcctgtctcagcctcccgagtggctgcgactacaggcatgcaccaccatggccagctaatttttgtatttttagtagaaacggggttacaccatgttggtcaggatggtctcgatcttttgacctcgtgatctgcccacctcagcctcccaaggtgctgggattacaggtgtgagccaccgcgcccggcctgtcctgataacttttaataagtaatacatttttatgtcaaggtcttacaatgggttgttgctgcaacactgttctctccagatctccttgttcccaaaattcatttgcaaccataagtgctacctgcaaatgagaaaggcttggttcactaaatccacttatgaatagagaacttgcattttattagtacaagtgacatttaaggatcgagtttacagtcaatgtttgaggtgctatcaaaccgtatgctcttaagttttaaaaagaggtcatttacagattatattgaaatgcaaaaggggagctttctcttcctacttcagtgttctaggcttactctaggagtatctatctcccatttacgattgccaccacttctcaccaacgaaaaggagaaacaggaggattaaatattatgcttcaagttctaacacttcgcaggttgttctttgtcctgtctatctgttagcatctagcatatgtctgtgaatgcacatgtgacatacacccattagtatgtagctttacctaattacagtgtgaggatattccagcatgaatttatatcactaaaaaaaaatttatcaagttcattgaacacctgctagctgcctttacattggcatgagccaggcttgccaagaggaataaggggtgatctttttctttaaaatgttcagagtctagtgaagacagtcatgtatacagtgtggtaagtgctgtaacaataatagtgtaagtgctatgggtcagggagaagggagtaaagataagtttcatgaaggaaggaggtggcatttatgttgtattgtgaagaacaagagtaattttccaggaaaagaggaggggaagaatatttgccgagataaaatggaacgtacaaagcttctgtgagtgcaggcttagagtgtgaagcaatgacatgggagaaggtgatgggaattgatgctgggagtgtgagttgaggacaggcagtgacaggccatgtaaattttgccaggaagcttgaatttgattctctaggccagtgctgtttactcttggagtctagggttcccctgaagtgctctagggcccaagaaggtggagaccaagagagatgaaagctaaagtagctttgcttttttctcttttataaagtgatctttgggcaagttttgttgggagaaaatagactttacttctttgggaaaaaagttggaaacctctggcaatggggagtatgagccttttaaggagtagaatggctgagttgagctctgtgtagagacatcctggcagcaagtcagaggatgacttgtggagttgatgtgagcatctattaggaggctgccaccatagttctgataaaagtcagaactgaggtactagcaaggctgatataaatgattttgaaatgagggagataagctcaagcaggaccccaggtttctagcttgggtgacctcatcgataaagaacagaggaagaagagcaggcatgtcgaggtggaaggagaggaagcgtttggttttggacttgatggtgacggagttcaggacaccctgccccaaaatattttaaggtgacggaatttgaggaaactaaagcagcaggaagatcagtctcaccttccccccaccttctcccctgaagtaggtcataaaaccaggtaaggattttctgaccttcccctgaagcagatcataagaccttcattcaagaggtgccctccctattcctggaggaaaggagccagagacacaaagatgccaagaagaatctgaacaaatcggccttgctaagctgcctcacgattagatcataccctctttgttgaattctatttctccatgactatctaattcatccaacctagcataaaacatacaagtttaactgtttcttagggtctttgtttcctcacaaaggctcctgtattacatgtaaaacaaataaacgtgtacgcttttctcttgttaatctgtcttttgttataggggcctcagtcatgaagctaggatgggtgagaaatagatattttttctcccctacactgagttctaattattcaatctttttaaaaagatacaacccacttttatagttaaacccatttaattctgggctctcttctgcttaggggtttccctagaaattattggaggaaaaaggaaggttttttcatccaattagtaagaaagcaagtggtagactagtgcctccccaaggtgggggaagaacttcagtggaaggcaaccttagacatcatctcacagtcagtgccttcttataattcacagcacattgaagaagagactgtaggagcaaaaacacccttgatagaggaaaacactaacgatgcatcctgatcttgttctgatttacctcattgatacagtttggctatgtccccacacaaatctcatcttgaattgtagttcccataattcccaattcatgggaaggacccagtgggaggtaattggatcatggggacaaatctttcccgtgctgttctagtgatattaagtaagtctcacaagatctgatggttttataaaggggagttcccctgcacactctctctcttgcctgccaccacataagacatccctttgctcttccttcgtcttccaccatgattgtgaggcctccccagccatgtggaactgtgagttcattaaacctctttcctttataaattacccagtctcgggtatgtctttattagcagcagcatgagaacaggctaatacactcctctatttaaaaactcagacatttcttggataattttataaaattgtttacagtgtttcaatgttaaagaattctttcaagaaagaattttccttccaaagttccttctatttgctttattctagggcctaatcaaattgcctactgtctcactaatatttgtaatttttcagaattctgaggttgcctaagatctttaggtggacatttacatgggacctaggcagtacctgacagtgtgacagaaaagaaaacttaactggactcacctgactttgtacctcccagggcttggtgatagcagacaagtcacatgccgtcatcatcattgcccttaggaagaaaacattttaaaatagaaataagtacaaaataagttatttttacaaaaaacaagagagaaatacaattttaactacctacatgataatctcttttttggttggatcaacagttacatatttgatggcttcttcttccgtttgcatttgttcacaggcatcaacaattttttgaaacatggtcctcttcctagaaaagatacagctgtgagcaacaattttagcatatgaaaagagagaaaaaatatcttaaatacatgcttttcagatttcacgttcccactttgcattgtgatgtccacatagcaaagtctacagggccagaaaatacgagagcagagaatggtggtataactttggctcagaaagggtttaaggcagaaaaagcacaaaccatacagagagagagagagagagaaaaacaaaacaaaacaggtaacttggaacacattacaacgaaaaagttacatataaggccgggtgcagtggctcacatctataatcccagcactttgggagactaaggtgggaggattgcttgaagccgggagttttaaaccagcctgggcaacaaagcaagaccctgtctctttaaaaatgaaagtaaatacaaaattacatatgagaaaagagaccataacctaaaaataaaggccccaaactatgataagatatcacaacacatatagccaacaaaaagttggaacccaaaacacatggatgtccagctggtctcactgctaatcaagaaactacaaatttgaacaataagatattatctcacactcattatattagcaaaataaaatttcaatttgctgagttcaagagtacttcagatatggtatttttctttttctttctttctttctttcctttttctttttttttgagacagaatcttgctctaccactcaggctggagtgaaatagctggatcctagctcactggagccttgaactcctaggcttaagggatcctcccacttcagcctaccgagtaggtgggactacaggcatgctccagcatgcctggctaattttttaatttttttgtagagacagagtcttgctatgttgcccaggctggtctcaaattcctggcctcaagtgatcctcctgccttggcctcccatagtgctgagattacaggcatgagccacctcactcggctggaactcttgtacactgtgtgtgggagtgctaactggcacaacttctcaggagtgcagttttgtaatgtagcatgaaattgaagacatgcaaatcctacagcattgtcacttttacatttcttagagaaactctcatatatatacagggacatacaaggtagcattgtaggcaatgatgaaaaattagaaacaattgaaatgtctatgaatagaagactgggtaaattaattatgaatattcaacagttgaatactctattcagttaaaatggatgcattggagctccatttattatcaatgataaatctttgaaacacaatgttccatgaatacagcaagttgcagaaaggtatgtacagacagtatgataccacctatggacaatttgaaaacacacaacaggttgggcgaggtggctcacgcctctaatcccagcattttgggaggccaaggtgggtggatcacgatgtcaggagatagagagaccatcctggccaacatggtgaaatcccatctctactaaaatacaaaaaaaaaaaaaaaaaaaaaaaattagccaggcgtggtgacgtgtgcctgtagtcctagctactctggaggctgaggcagaagaatcacttgaacccaggaggcagagattacagtgagccgagattgcgccactgcactccagcctggtgacagagtgagactccgtcgcaaaaaaaccaagaaaccaaacaaaaaaaaacaacacacaacaataccatataaaaacatggatggaaatgatgaatacacatcaacgtcagatggtgatatctttgtggaagaagggaagggatttttcatagtgaagtaggggtggaatacctcaattgcatcactagtttttttctccttataaagcaaaatctgaggcaaatatggcaaaatttcgcatttgttaaatctaggctatagatatttggatatccattttattattcttagtatttgtcttcacgttgaactatttaataattaaatattcaggcccagtgcaacggctcacacctgtaatcccagcactttgggagggcgaggtgggcagatcacttgaggtcgggagttcaagaccagcctggccaacatggtgaaacccatctctactaaaaatataaaaattagccagatgtggtggtgggagcctgaagtcccagctactcaggaggctgaggcaggagaatcgcttgaacctcggaggccgagattgcagtgacccgaggttgtgccactgcactccagcccaggtgacagagtgagacctgtataataatatatataataataataaataataaataaatatttaatgaaggatcagaaaggcataattttacaatgcccaagccactgaatatttcaatcctataactagttcatcttgttctaacccattttcatcaagcaactttatagttcacttatgagaaaatgtggagatactgggagtatctggtctccttggcaatattactgttgtaaataggctggctctctgttacgtacgactcagttttgtaagtttggttaatgtgtgtcaatgccaccaaaattgttcagctcccagactttgacagaattaaatttctgaggctgaaacattaaaatgccagattctggaccatagagaattcaccttgacaaaaagccacattgagaggtctcttggtttcactcttttgacaaggcacaaacttggctgcacattctgcaattcaaacctgtttggagagcaacctacttaatattaggagcttatgtttttaaaatatgttcccagaggtctagtaaatttactggcaggcatctgtcttgaagatactctacttggtaatccaaaaggagagcaaattttgtgtgtgtgtgtgtgtatgtgtgtgtgtgtgtctgtgtgtgtgtacgtgtgtgaataaatgccttttaacattaatgcaacagataatttatggaaggtaaaaccacacagagtacagggcattccactgtgcagagttatgtacttacttgaaatataaagccaggtcagttgctattattgcgacctcgaacaaatgaataactgtttcaaactgccgcttatttaggttctggaagatgtttaaactctgtaagatgaaaattcacaataaaatgctatcaataatttgcctctgattgaacaaatgaaactatgcttaacaagaagaaaatctaaaagtctttcaacacttttttgtttggttttttttttgttttccttcctttttttttggcttgcttttagtttttatctcatggactaagcaaacccctctactatactttaagtaagataatttaatttaaactataaaaatagatactgttagccaatattcatgtaatcagtgtttaactttttggagtaaataaatgttttcttctaggaccattaaaataaataacaatagattaaaaatgtgcttgtattaattgagaagctttaataaagaatttctgggagaagtccaacagtcagacatgttactttatctaccaggtaattttagagtgatcatagaaaccactggtctttcagaaattgcaaattacactcatatttgtgtatatgtaggaaaaaataatgaaatccttccacattatcctgaaaatgttttaatgcaattctattttaccaagacttaactagacctttcttcaaagagtttctcactacatctcttcacataaggatcagcttcatttcttagcattctagaaaatgagaatataggccgagcatggtggctcatgcttgtaatcctagcactttgggaggcggaggtgagtagatggcttgagctcaggagttcaagaccagcctgggcaacatggtgagactcctgtctctactaaaaatatggaaatacaaaaatagctgggtgtggtggtatgtgcctggggtcccacctactcaggaggaggccaaggtggtaggattgcttaacgctggggactggaggttgcagtgaactgagactgtgccattgcactccagcttgggtgacagagagagaccctgtttcaaaaaaaaaaaaaaacaaagaaagaaaatgagaatataagctgggggtggtttcttaaagcctagttattccaaatagaccattttagtcatacaggccaaatgacagatatatagtgattttgccaaatgaatttgacagttacaaaatacagaaaaactccattggaaagaaagaggagatagtctatcaaactatataaagagagaagtagcataatgccaaaaacaatactggcctgaacaccaaataataacagtaaacacttacttagttcttactacctactaggctctaagtgctttgtgaatattcttaatctcttcacaacagaccccagcacagagaggtgaagtaacttgcccgaggttaaacagctagaatgtggcagaactggtgtctaagccagtgcagcatggttccagagtctgtgctcctaatctctgcaccacactacattacctctcaagagggaacccaggttcatttcctggcttccccactttggcagtggtataatcctagagacttcacttaacatctgtgagtatttgttttctcatatgggcataataacagctgccctgcctaactgcctagcacttagtctatgctcaattaatatctgtggaatggtgaatcaaatgaaatgacaactgggaatgcattttaaaactgtaaatcgctgttaaaatttattgttgtatcattattattattaggtaaagttatgaggctagctcctggtagaaatagaattgcaaacctaagaccaaatatggctcagtcatttcagaagattgaaatattagaaagcaataattggacaagaactcaagttttagacactacactatgccttatataaatcttcacttaagtcatctttttataacattttctaggacaagaaaagtggtgttttacaaagcatatataagtaatagaagggaaaattgtgatttgttttgtcaacataatgagttcatcatagcaactatagttaaacttttaaaatagctagaatgaagcaatgggtgttgaccagtctaaattacaaaaacaaaagagagattatctggatcaaaatcaatgttttttttcgtttttgtttttgtttttgttttttttttgagatggagtctcactctgtcgcccaggctggagtgcagtggcacaatctcagctcacttcagcctctgcctcctgggttcaagtgattctcctgcctcagcctcccaaatagctgggattacaggcacccaccaccatgcccagctaatttttgtattttttagtagagatgggttttcaccatgttggccaggctggtctcaaactcgtgacctcaagggatccgcccatcttggcctcccaaagtgctgggattacaggcatgagccaccgtgcccgtcccccgaatcaatttcttacttgggacatttcacagaagcctattgtacatatcagtccagaatctctgaaccaaatctggatacaggttattttcaacctggtctggattaccagggaggggaaaataagcggggtcattttgatcccacttaacctgcccctgattttggaacaatggtggccttccttttggacttggggtgatccagtggcatactgatatcagggaatcactgcctttatttgttcactgatgaacattgctatgttcccaaagtgatgtttattatctgactcagatacatacttggcaaattaataatatttgaagccaaccttgattgctatactaggaaaaaaagcaaggggaggggaggaatgtgtgaaaatgccttaaacttttagacaagttaatatttatagcacattaagtcatttaaagaagcaaatcagactgctgaattcagagaaataattccctgggacagagacttcctcgtctctaccaagtgtcagattgtgcagagtatataatctacaacaaatcaaataaatcaaatttattatgcaccaattgttttagtgcatattgcttaatgtaaacctggacacttgttgctatttaatagacgtgaaagaaaacgctatatataaagaaatatatagaaacatatgtgacaaatactgtttactcttatacctttttccaatccaaaataataaaacagctgtattaaagttgatagattatcaaaaactatattacttttcaaaatgagtcaatactggatttttaaaaattgatataatgaagaaaaagggtttatagtcaccatttcaatactgcttcttttgtatatagcactacatatctgcatttcattcatacctttttcttctcactcattttcatttttatctaaaaatatgtacaagcctcctaactgaaaaactcttccttaattctacattcttttagattttctcagttctccctttcacacctgaggttcttgaaagaagagcttctaattgacttattaagttgtggatatagattcatataaaagatcccattccagtttttgtattagttgctagaaagcacttggccaaatttgtggcctgtgtctgataaacgttttggccaaatttgtggcccatctctgatatatattttgggtatgtatggcctttactatgctcacctcgtttttcttatttttccattagtcctcattttctttttctttagtgttgtatgtattcttcgaagctccatcaaattctctttggaacaaagtgggacacacacacacacacacacacacacttgcacacaagttgggttttttgtttgtttagtaagtaaacacagactcagtgattctttaattagagcaagaggtctcaagatgtgcccagcacacaggagaagcaaggaattcctttcaagacctactttgacaacacaaaacaacagcaaaagaggagttgatggagaagttatgctgatgtacatttgtattgacttctgatattcaatctcctagaccaaagacattgccataggtaacaagaagtgaaggagggaaggcagacagcaatggccagatcccaaatagaaggcctggagcttcatgggctttgctcagtgtgagctttaccaacttccggaaaacaaaatcaaagaggtgttgatatggctctgtgtccccacccaaatctcatctcgaattgtaatccccaggtgttgagggaggaacctggaaggaggtgattcaatcacgggggcagttctcccacgctgttctcatgatagtgagggagttctcacaagagctgatggttttaagtgtgccacttcctcactctttctcacacactcttgcctgccaccatgtaagacatgccttgcttccccttctccttcagccatgattgtaagtttcctgaggcctccccagcagtgcagaactgtgagtcaattaaacctcttttctttataaattacccagtctcaggtagtagctttatagcagtgtgaaaacagactaatacaggtgtgctccttagaattggtgagagaatgtttgagacaacaaattggaagctgaggatttccccagctcattcctgcacttcttccacggtactcggcagatagttggctccactcagggttgagtaattttcagaggggaacaagtgcaaaacctatgcatataatgaccacaagaacataaaataatccatagagcgagtggaattccaaccaaaataccaacaagtttgtgtatgtgtgtttgtaaattgacaaatcaattataaaatttatatgaaaatgtagagtcaataagtactggactcaattaaaagttgaattaaaataaacaatagtggaaattacagagcaaaatgtaattttataaatattgataatggtaaaaaattaaaaaattaatatcatataaaacagacatgtggggaaaagtataccaattccttcatatttcatagaagggagttagtagatactgtaaagttaacacatatagcttaaaaatgtcaaacatctaaatgctcagctacaacttttcataatttttcatagtcatttgttattcattttagagggctctttaagagctaacatttcttgtgataaagacaccattatgtgaagttctgcaattctttccatttcaaaaacatttcttctgttaaattcaaataaagtcaaatgcaataccttttatttaagataaagggattctacttagcaatgaaaaaaatgaattgactgggcacagtgactcacacctgtaatcccagtgctttggaaggccaaggagagaggattgcttcagctcaggagttcaagaccagcctaagcaacatagcaagaatgcatttctgcaaaaaatacaaaaaattagccaggtatagagactcatgcccgtagtcccagctacttgggaggcagaggtaggaggtttgcttgagcccaggtggttgaggctgcagaaggctataactgtgccacagcactccagtcttggcaacagagcaagaccccatctctaaaaaaaggaaagaatcatggacatacacaacatgagtaatctaaaaattattattctgcatgaaagaaaccaatgcaaaagagtgtgattgattgcatgattattctatcattgtgctaattgtgtgattgcacttatataaaatctagaaaatgtaaactaatccatagcaactgaaaacatttcaaaggttgccgcctagggctgggagtggacagtgggatgtgctgtgaaggggcacgatacaagcaattacttggatgatagaagtgttctgcatcttgattgtggtgctggtttcccaggtatataaaatagtcaaaactcatggaattgggcactctagagatgcagtttaggctaggcatggtggctcacacctgtaatcccagcactttgggaggccaaggtgggtggatcacctgaggttgggggttcgagaccagcctggccaacatggtgaaaccctgcctctactaaaaatacaaaaattaaccgggagtggtggtgcatgcctgtaatcctagctacttgggaggctgaggtgcgagaatctcttgaacccaggaggcggaggttgcagtgagttgagatcacgccactgtactccagcctgggcaacaggatgagactccatctcaaaaataaaataaaataagagatgcagtttattgtacatatacttcaatgaagttgattaaaaaccaactctggcttaaaaaaatagcttgggtagtgggaacacatggagtcctttctctccatgcttcctatgtatatccacagggtgactgcaatgaggttcattagacgttaatgaaatatcgatttctggatggtaggatttgaagcaatttaagaaatatttgtctttgatgtttttcctattgtttgaatttttatagtgggcttatgtaacttttgcaactattaatgaatattgaatacatgtataaatatgtaatattccatttgttttcgagcattgtgttgaagacattatgtggagacaggtgcactagacgagaaaggagacctacttcccagcccctggccacgggccctgacttgctaagctgctttcatttgctcacggaaagaatcttttttattttccctgactattaaaatggcgatagaaatatgaattctgcatagcacaccccaaacaggtagaaatggctttaattcattcaggtcgtggctctcgagctagctgaggccagggaaagtacaggccgttctagtcttcagcatggtgcctatgacgcccgcaagagaatattgccaacatgttcttgccttgctagtgccagtacacaaggtatttgatttctccttcacatttctatgtgtaaaatggggcaggttgaagcagttgatatgaaaaagcataaataaaattatcatactttggaaagagatgttctgaataataacaagattttgttatttatgctgagcaatatgttttgtcatttctacagtatattctagtattaaaatttatacttgtgcaaatttggctaacaaggtttccacccattcatttgggttaaggcattgatttctgtctggtttagagtacaggcagttctattcctcaaagcagtgaatccatctctgctaggatagaaggacattgccgttcaaagccttctaatatgcaaaacaaaatgtctgagtaatgcccacagatgctgaaattactggataaatctcaaggattttccttatttaaaaaaattaaaatttttaatgtgtgtattttctttagagaatgaaaaaaatacaagaactacattgtctccccaaaatgtaaaaataatatctgataggtaacaatctttttgtgtgtgtgtccaatttgactgctcataaacaggctctgtgtgactgcattgcctagcgactctattgacaaggctttaaaagtctgcaattagcaggttgaatggtattacagagaggtccttgaaaagatggtatagattactgagatgcaatattcctttttagaaagaataataagtctttatatagccatcaaagccagttcagactgcaaagtaaataacattaaaaaaaattcagatggaaaactgtaactctaaactgccaaatcccagaaggaaaaacatttaagaaactaggagccttctagtgttaagcatgtagatatttggcagctgttttaaaacagtattttgttttagtaggtgactgtatgattatgcgatacatgacatttgatgctacctcactgtggtatcatataaacagtgggatttacagaaaattcttactcagaaaccaaagattgtctcaaccagcaaaataaagacttataacaaattaggtaataacaatttactcttacattcctgagttattttcagttccgctccttcttttaattctcatagaacaggtgttacctatgctgtgaattctgctgcagggagagattctgtctgcatatcagaattaaaagggttctggttcaaaatacagattcccaggcccaaactccagagagtctgttcagtaagtggagaatggggcccgggatctgtgccttaacagcctgtctgcccccgccctgttaaattaatgagtccgaaagagttggtccaggtacccatgtctgagaaccaccatctggacttatatgatgttagcgctttgccaagagcattgcagaattagaaatgccacagcaggtctgggttgacaatggtgttgggtgctgtgtcaatcacagattgttaaaacaacacaagcagttttcttgtttttccatttttctgcgcagttgctctgccttatgagattttcctgcttggcttatgaggaccatcttggattttcattacctagaagaatttagtattctctctaaacttggatatctttctgtatattctccctgagcttttaataaaagattattattaaaagtgagaaaagcccactctccagagggctcatgtatcctaatgagcatgtgattctgaacaagttcactgcctgtgacaaaacagtgctcccctcaatctaatgactcaccttaatcatttttggtttggaacgttcttaagaaagtataattagacaacatccacaactttccacatgcccatatatcccttcaataaaattgatcaagggaagaagaatgactaccctctctggaagatcagtagtacgtaatatgtgcaattcacaatgaattcaaggggctgagccgctcctgcagaaagccatctctgatcccaccctctttgcccctttccgctgccactgtcttcacacaaatgtggtttctccctttggaactctcagagcatggctcagtgcctctctgatggtggctacgtcatgcctacctccatgatatagtttggatctgtgtctccacccaaaccccatgttcagttgtaatccccaatgtcggaagtgggtcctggtgggaggtgattggattttgcgagcagtgtttcttatgaatggtttagccccatcctccttggtcatgatactgagtgaattctcatgagatctggttgtttaaaagtgtgtggtacctcccccgcatctctcttccttctgctctggccatatgaagtgctcgctcccccttcagcttccaccatgattgtaggctccttgaggcctgcccagaggttgatgctgccatgcttcctgtacagcctgcagaaccgggagtgaattaaacctcttttctttataattacccagtctcaggtatttctttatagcaatgcaagaatgtgtgaatacactccactatgaaagcttgactttcttaaaggcatagaccatgctctaaagcatatgccccatgaatgaataagaaaatcagtgaccatgtagcctcctttcctctttacatttacatatgcttggggttcacggagcccttttgcatccaccataagctttttcttctttccctacagacccacagagattctgtgactttccatggctctcttcacctgtctcagctacttccaacttggctgttcaaaaactagttcgatatagcaatttctatcaattgacttcaacaagggtatacactatcaactgctgtaactcaaggccaccctttttccaagcattttctgtgggttagtgctttgatccagaatttgtgtttagctgtcctaaagagaggtttacgtacctcatcctgcaacagagtcttactgtactccaggtggtgcctctccaaaatagaagaaccatgaagtcttgctaatggagatgtggatctagaaggaaaacaacatgccatgattctagctgtttaaaaattacacataggttcatacaattcaggatttttcttaatgtctctcttctccctcctcactcaattatctgtgaagtggtcaaaaataacatattggaaaagattttctagatttagaagatgagaatatgctcttttggaaaaaaaaaccttaatttgttgaatgcataaatgatttaattgtttaaactaaggagttcagctccttgtatctaaattctttaagttccctggggcttatggcggtggactatgacttataaaacatatagcaaacatgtggaggcccataggttatctgcatagaaccaagatgaaaagcactataaggtaacatttctctcctcccccaagacagtgagataaatgtatctccctgttccttcccatttattaacgattagatcacagctttatataagtaggggccccagtcttttgtaccctgtttttcttcaatgccttcagggtaaaagaggctgatgtcaaaggtctagagattatgtgaagactctcatgaaaatatagaataaataattttaaagaaagaagaaataaaaaacatggctggtagccttagtagagaagctttatttatttcatggagaacaaaactttaggctgagagaggtcattgccaggttactggcaggtcagggaaagcaaatactttagttggggaataattaggccatatctgatcaatattataatcgatcataattttaacacatatttaaacaactactctgtgttgggattagagatttttaaaaaaatgagtaaatcccagtttctataaccatcaaactgctttctatcttctgagatccacttttgaagcctccatatatgagtgagaacatgtgatatttgactctctgtgcctggcttatttcacttaacaaaataatctccagttccatccatattgctgcaaatgacaagatttcattattttggaggctgaataatattctattatatatatactatatcgatatagtgtatatatacactatatatatactatataaatatactatatatgtactatatatatactatataaatacactatatatgtactatatatatacactatatatgtactatatatatacactatatatgtactatatatatacactatatatgtactatatatatactatatatgtactatatatactatatatatatatacacgcaccacattttctttatttgaagatagagagtagtttggtggttatcagaggccaggaagggtagggaggtgggaaggatgaagacaggttgattaatgggtacaaatatacaggtaggtagaagaaataagacctactgttcaataaattaacagagtaactatagcaaacaacaatccattgttatttcaaaatagctagtaaagaataatttgaatattcccagcataaagaaatcataaatgttcaaggtgatggatatctcaattatcctgatttgactattgcacatcatatgaatgtatcaaaatatcatgtatcccaaaagtatgtatatctattatgtagcaatttaaaatgtatatttttaaaaatgaataaagctcaaatctagtcagaaaggagtggtatctttaattcctttaggtttaaaaacattagttaaaaaatgttattgggaagctagatattcatctgatctcaaaataacatttcacatattacttattaattgcaaaggagaaaatgttcctttacataaagagatcttctggacatcgtccataaataaaattgatatcatgggcttcttgacacaatgcattgagaaggacacagcatcacctatgtagtattcctgccaaaaaaatgtttagtctgaatttattaatcaggaaacaagtggttaaatccaaattgaaagatattctgcaaaatagttggcctagactcttcaaaaacatcaacatcctgaaacacataaaaaggttgagcaactactccagattaaaggagattaaagatatttgacaactaaatgcaaagtgtgctccttgattagatcttgaattagaaggaaaaaatagctataaaggacattattgtggtaattggaaaatttttaaaaaacactttatattagataatattattgtaccaatactgagggtgatcattgtattgtgtttatgtaggtgaatgtcctcctaattcttaataaatatatgctgcaatatttaggaatgaaatctagtattgcagccgactcacaaatgatttagtgaaaaaaaaaaaaaagaattagttggccacatacagtagctcaggcctgtaatcccagcaccttgggaggctgaggcaggaggattgcttgagcccaggagttcaacaccagcctgggcaacatagggaggccctgtctctacaaaaacaacttaaaagttagccaggcatggtagcatacacctgtagtcccagctacttgggaggctgaggtgggaggattgcttgggccccagaggtcaaggctgcagtgagccgtgatcatgccactgcagtccctgggtgacagggtaagaccctgtctcaaaaaaatatatatattatttatatacacacacagacattcacacacactgacagtctgcagtcaggaagcccttccatcaccacatgcccatacagttgagtttacagaggaggaatgatgaaagaaaaccaggccaatgcagagggcagggtgtggctgcatgcatctttcctgcaaacctggaggcaagatggcaacttcaatcctgctacttcctataacctagggaaggtttgacttcatcttttgagctcatcagttaaagtgggggatactagtacctcctatatggcacctcccttcactgtgctgtgaaggttaaatgaggcagtaggtatcaagtccttactagcacgcaatagatgctcaatttgtttctctggaactgaattggctagtatactactgatcaagaaggaggacgaggacttcagtgactgtcaggggacttgcattctggaggagcgagcggccagtgtaggctggaacctttgagatgaagatgtctcttgcctcaagtctggatggagatcatcttttcaagacaaagcctaataataggtagaattgctgaagatgaggagtcactgcttacaaagtacttttcgctcaatgaaattatatatgtgaaacctgcctagcaggcactttctcaagtaggtttcacatacgtaatttcactggattctcacaacaatctttgagaggtcaacactttatacatctcatggctaagaaactgaatctcaaatagattaaatgacttgtccaagatcccccaaccaagaagtagttggtccccacaaacccaagactccaaagcccattcagtctgtctacaacacttcactacttctggagaggggtagttcatgtgtcagaaatgagaatgaagtgtggctaaggcagatagaccatcttaaaacccattatcaaggaactgggctggccatgagcaatactggtgaatgaatagtccaatgacatcacaacaataatagtaaccataataatacctaaagtttatttatttatttattttccgagactgagtcttgctctgtcacccaggctggagtgcagtggcgtgacctcagctcacttcaacctctgcctcctgggttcaaacaattatcctgcctcaccctctcaagtagctgagattacaggtacacgccacaacgtccagctaatttttgtatttctagtaaagatggggtttcaccatgttggcaaggctggtgtccaactcctgacctcgtgatctgccctcctcagcctcccaaagtgctgggattataggcgtgagccaccgcgcccagcaatcatacctaatatttattaactgccaagatcctaccatgagttgagggctttatatgcatgatcatatttaatctttacaacaaccttatgtgctgggtaccattattataattcttactttccagatgaggaaattgaggcttagaaagtttaaataatttgtgacccagtgaatccaaatctgcctgagcccagagcttgcacccttcttattgtacttcctttcttggggcaagagagaaagatggcatcgatgttaagatggaagaccagctaaagtttggcagaagcaaaaagaccagggaagtgaagggtagtgagcccaggggtagtattctctagcctgagctggggagtgctccataggagtgtacaagtgtaagcctaacattcatgtaccttatgtacttgttttttatttttaatttttttcgagacagagtctctctttgtcgctccagctggagtgcagtagtgcaatcttggctcactacaacctctgcctcctgggttcaagtgtttctcctacctcagaggcacatgtctacctcctatagacatgtgcctataatcccaggtgtgccacacccaactaatttttgtacttttagtagagacagggtttcgccatgttggccaggttggtcttgaactgacctcacttgatccgcccgcctcactctcccaaagtgctgggatttcaggtgcgagccactgtgcccagccagattcatgcactttaatataggaattcaatactctgattaaacaaagttgagagaagaaagcctgaaggcctataggaagaaggcagaggcacatctggaaatgaaaacagaaaggaaagggggacgcaagcacctagggagaaagagcaacgttatcgtgaaggcggaagcttgggagggaatagaatccagccctggaatttccaacatggcaaagaggcattgactgggccaaggaatagggagaagcgtttttctcaccctaagtactttccaatgtccaccaatatgtgtcaacattggacatgtgttcacttacttcatctggtacaaattattggtgcctctgtggtcaatatcatggcagaaagcagcagcaagcatggcaaaggcttcgagatctgtgtagtacttctttaatcttcctgtctaaaaaaataacatatatatgtatatctataatttatttgaattaatatacctctataccaagtgtagcctgcaatagagaataggcccactaggtttctggagcaagttcactttatttgttgtgagtattgtagtactgtgggtgaagactgaaccttcctttaagaaggtaagtgtgtgaatgtctgaatgatcatcccaccggtgctcaaggatactgggactcatctgcagcggagaggggtttgtgccctgaatttttaaattactgatctaaaatgatggaccatacctatttctcatcatgctcaaatgggaaatctgcaggtttacaaggatttacagccctctgtacctaccatcagcaaagtaaacatggtctgccccacgttgaacccatgccgccaattgtggtaagtgacagctcggtaccctttcctcacagtgtacatccatctggtaagaacctaaaagaagatgacaccattcagactttggaatagaattctaaaggttagaaggtctgtggcaatcttatctaaaaagatgtgttggtcttgttgacaggggttaagctgatgtatttagaaagttaataataatttaaaattcaaactgagtccatcttttgaaccacagaaaacatcagtgaagcagagccacagaatcacacagtattttaaattaaataccatctgacctctacaggtactttgaatttctccaccacatttatttcaaaaaacagtcgtattccacatttaatcaatccgtgctctgtaagagggaagtcactgaagcggaattcgtacagttctgctgagcgtgggtctggcaagtcctctttctgttgaaataaggatgggttgtttcagattacattcatctgttttccctttccactcccatagccaacattgggtgtaaaccaaaattacaataaaagaacacaatgtgtgattcactgaaccaccatgtgccaggcactggatgatgctgtttgcacagattatgctaacggcaggcctacatgattatctccattttacaggtgatgaaactgagacttggccatattaaagactttctaagtgatgggttaccattctaaatccaactccagtagctcttttctttctatgatgcaaaataaaatgtttagttacaaaagccttactcatttttgatactcaactttttttctgttcaagaaatattcagtaaacagtaaacgactgcttaattcaattctcttgaattttctttatgtgctcagtgacagtttcccactagaatgtgagctccccgagggtggggatcatctgcttatttgctgccatatcccaaatctgcaggtcctgtcccatgaaggtgctcaggaaatgcctgttgaatgaatgagtggatggataaaccaatgattgccctgcagtacataggtatacttgcagacatttcatttaactcacatctggttaggatttcggattatgtgaaaaaatagccaagtagacacatggcattggtgcgacttgagaaataaaaatatggatcttgcctttaaggaacttaacttattaaagtggctataaaatatatacgagtgaaaagtaagcacttagaataatcagagagtatggccagtgctccatgccgagggagaaactgaatgtccttggacaagtggggaaattaaaggaggagagatgctggagggacatgcatgcagctgagctggcagaaggaagcggagagacgattccatgtgggtgagaaagtgctaagaggcagaaattagcaacaactatgtgggtctaccagacagatccgcaggagagattcagttcaatgggtatttatttgaatgtgtagtatgtccttactagtgcactgaggaggacacaaacagagggaaagggaggtcactccccttagtaagtttaatgtttttcaggggacagccatgctctacttacacagatttcaacaccgaatggtatatagctatttaaaacaaaattacggtttctggtccccccagcccctgagcctgggctggcccctcacactcttgcaaagaactgttgctacacccagaaaatcagctgagccttccctggaggtaacatgaaagtgcaggcctggagagagactcaggtacgtgaagatggacaaacaattacgtagctgggaaatgatgccaggataattttggagaactcctctgaaatatttgttacgttcctcaattttatgcaacaacgatttgggatttgccctgagtagattttacattcaaaataggctggttttttaggaagtctactggttctttgtccactttattgcttctacaacataagatccttcttcctttaaataagaaattagagaatttctggtgacacggatgtcaataaaagttttgttttccaagaagatgcctattgttgagggcaggtggggagaagaaagggtggtcttctgggccaggctgagaggatggtgccaaaggtggagccaagcaaaatgggagaaaagggaacctcagatgacatgaaaacacgggggtgggaagtaagccccaaaaaagggtcaaagaccaacagtcttatggtagcagagcaaaggccctgggtgggaggacagagcccacaaaagatggaaagggagaaggtgagatagtcgatgtgtcttagtttagaaagaatgctcacatcacggatcggaaagagacggtggaaaacaggttatagcagttagtaaggaaattaagtgtgatatttccatttcaatcagaaggaattcaatcctctgaaattcaaggtcttggggtcttcgtaaatatcccaggatttcatggattccagaggagccactttctagaaacaagggctccaccctaatagtaggaataaaaccaaaaaagatcatcccaaatgaaatctaaaacaattctctcacctgccagaagaaactctaatgctctttgcagaaggataatatcactcagagcccctacacgtttttatctacaatatctgattttttattttaaaagcataaggcatgctttaaaacaggatcaaatgactagaacccaggtgtaaaaataaacagtagaatcagatctacaggtgattctggtattaagatgggtaccttaaaataatacacatcaatacatttattaaaatacaagggaaaatagtcaaaatagatcaaatgatgaaaagttttaacacagagttagaatcttaacaaaataattaaatgtaccttctagaactgaaaaaaaatctctgaaattacgaacttattgagcgagtttaacagttgattgggcacaacaaaagacagaattagtgaagtgggaaagttaatttcaaagaaaaatagtagggatggcctactggcaacaacaggaaagaatggagccttcagacgccagaagagaagctagaaatggcaggcggtgccagtgcctagaaagatccatgctccacgctaactctgtcatgttctctgtggtggccatggtgtcatccaaagctattaaaataaactgtgccttgatatccctagattctgtgcctgaagtcccctaagcagtagtctaggctacctacaattgtaaattatctgtatgaattggaccagaggcgacaaagatgaagaaaagcagggaatcaaaagatcaatctttagaagaattctttctttttagccttgagaaatatcaggaaagagaaaactcaacatttacttgaaaaacaagaaagcatgtcctaatatattattgatttataatgcctctatttaacaggcattaaggttagaaagaaaacacttaccaaaattgcaacaagttgtttttcttcacagtcgtcaattacatcaacatttaacttctcttgaaatttctaaaatgtaaaagcaattgaggtgtgaaattcctaaaggagaagatttccatctgattcctctactattacaatcttagttaagatatatttaaaatatgtgggaggaagaggcgggaagatccctggagcccaggagttggaagatgcagtgagctatgatggcaccactgcaatccagcctaggtgagagagtgagaccccatctctaaaaataagtaaataaataaaatatactacaatgagttccatggcaaagatgcattctttgtcatggatacaaagacctatagcacctgattatgaagacttttttcaagaaataatctaatatatttgatttttaaaattcccccaaaatgattacagtagctggttttttttaaagaggtgtgggttgtttgcatgtaggaaagaaaaaatgagtggcttacatttatttttgtattagcttatcacagttccctttattacccccagatcttctcatctttaacatctcaaactatcaaactgaattacactcaaaccactcggcaaaaccaaaaaccaacatgctcaccaaaaccaacccactccagcaaaactacacacacacacacacacacacacacacacacacacacacacacagagccagggaaataaaagaaatagagatggtgggcacatgatattttcccttcattttgtggtgattagaacatggttagcaaatatccacttgctcccccatcatctataaggttggtcttcgtgatgtggctttctttggccaatgagcattttggtgaatgtgatgtgagcgaaaacctgaagtatgcctgcacaattaggtttgctctcttgcacttctgtcatctctgtgagaaggacatctatcaggtagctcctggtccaagaaggatgagagacacatcgagcaaaccaaattcatagcttggagccaagtccagccactgtcaatcaaagcctggtcaacccacaaatgtgagtgagagatagaggttcattactgcatgacactgaggcattagggttgttgttatgcagcattatatgacaatagctgactgatacatttcccttcctaaaatatatatatatttttcttgctatagctcccatagccccagggctgttttgaacaaagtgctattccagccaagcagctgtacttccagtaagggtctctgtacactgggccatccatgtcttcttccaacccctccttccctgtctctctctctctcagcccaggagtaaaccatttgcatttgtcagacccctgggtaattagatgacttctagaatatgtggttaggtaacatcttatgtccacaggactgaatttcccacttaccaaaatggacttaatttcttcaggagtggctttggtttggttcatgagcatttcctgagcaatgtcctttctgttttctagcttattcatcttatcgtaggtgtcagtatttaaaagagaccatccaagaaattgtgtgagagtctgaaacggataaaaggtgattctaattctcttcagtgaaaggaaaattggtttggaggcaacaatctgcacgcttttctatccatctcccttccatcatcaaccaccccattccttcttttaatttaagaaaaacatactaataatcagcttcagacaataaaactggctgaattattgctttttaaagtgtaccatgcaccatgaatagaagagagaggtgttaccaacaccagtatagtcaagcaggacctaaaaattaggcagggggctgggcgtaagaataagaataagaacgagagggaacaggaaggaggagtgggagaaagaagaagaaaatcctctttcctgttttccgagtattattacaaattttggttaagctaaaattttatactttggtagaaaatgttgcagtttatagaagtcaggaaatagaaatgacaaaataacaacatatcggttacagctatgtgtgactcatgtcttaatggcccttcaaaatatcattccagaataacaaataattacgcgccctctcttattttgtgaattgcattgacttccattatcttattattgcacttgcctcggtaatgtattcatcatgctcatcgaaaggttttccatccttcctgttgtaaaacgtagccactcccacaatatcttctttcttgttgacaataggcagggacaaaacattcttaatgacccaaccagtttcgtctacaggtcctttctacaaacgagaagggacctcaagttatttttttgccttttgagtttgaaataatcatagattcacaggatattacaaaagaaatgtacagagagatttcaggtacccttcacccagtttcacacaatggtaatgacgcttagacaagtacagtacattttctaccgtcttgtgtaactatagtacaatatcgaaaccagaaaacagacattgtacgatccagagctaatttggattttaccaagatttgtatgcagttacttttgcacatatatgtgtgtgtacatatagttttatgcaaatttatcccttgtgtagattttcaaccaccattagaatcaagatacaacactattccatcactacaagactgtcctgtactgctcccttctagctaccacccaaccacctgtcacttagtttatttttaatttaaagaaaaaggctgggcacagtggctggagcctgtaatcccagcactttgggaggcagatcacctaaggtcaggagctcgagaccagcctggtcaacatggtgaaaccccatctctagtaaaaatacaaaaattagccaggcatgatggtgggcacctgtaatcccagctacttgggaggctgaggcaggagaattgcttgaacccggaggcagaggctgcagtgagccaagatcgtgccactgcactcaagcctgggcagcagagtgaaattccatctcaaaaaaaaaaagaaagagtaatcttttggtgttagatgtgcaattcctactttgtgtcagaacatggctaggaccatacagccattatatgtactctagcacatccagtagagtgaactagaaccaagtgtctgttttctgacaattctaaccttttccctttctttcccaagcccgagtgatgggaagtgcttcttaccactatgttacctcactgttccctttacactttttctatcttctaacacctgtttagctaattccttaaataaaattctcccgttaaaatactagtgtggtttttgtttttctgactgatccatgaagatagtctttcatcctgtggtgtgttgagttgagtaaacatttgtcaggcctctgtggtatgccaggaactggggcagttgctgaaggtacaaagaataaatcacaggtcttgccctcaagatgcttagggtctagtcgagggatgcaggcacaaaagtttaggagtgtttctcaaagtgtggtccaaggaccacgtgtaacagatttgttttagtttgtttaatttttttttttttttgagacagggtctcactgtgtcacccaagctggagtacaacggcacaatcttggctcactgcaacctctgcctcccaggttcaagtgattctcctgcctcagcctcacgagtagctgggattacaagcatgccccaccaagcctggctaatttttgtatttttagtaaagatgaggttttaccatgttggccaggctgatcttgaactcctgacctcaagtgatccgcccgcctcagcctcccaaactgctgggattacaggcgtgagtcactacgcccggcctgggcatgcatcttcaataagcttcccaggtaattctgatgccctctgaagtttgagaaccatgatgtagcatttgcacagtatgtagctaaggcaaagatagacaagcactcaacacaccacattatttgttcttgaagacttcccttggcttacttagtcatccttacaggcccctgttaagtcttggctctcccatgaagcctttctaatttttctaactcataaagaacttttctgttttggaattccaactgcacttatagcctgaaccacaatttaacatttagactgagcatgtaataagtgctcaatctaagtaacttgttactactctatgtagtcattatacatggaatgaaaagcagaggaaccaaacctcaacatctgtctcctgatggtcaaagctttagaaaaaagatgcagtgcatagtgcttgcaaagcctgcatctttggaaaacaataagaaatatttatgtacttacaccatcatacgaaccaaggacaaaatcagtaatagaaaatatatcacatgcgtgtgaaagaacttcatgtgtatttgttaaagcttccaaaataagctttgctgactgcttcttggtgtttcaggaaatattcatttgctaccagttcatattcttgtgctttgccattagttagagcttactgacagacaagtgacagaaggaacccaaggtttaagaaaaattagtaggacaaaaaactgaggaaattctatacacttttcctcctgtgaattaggaccactttaattgatgttaaaggaagaccccttagtccacttcgaggaaccctatggcaggcagaacaatggcccccaaagatgtctatatcctaatctctggaacctgtgaatatgttatcatacacaacacaggggaactaaggttgcagatagaatgatggttgctaattagctggccttaagatggggaaattagcctggatgttccaggtggacccaatgtaattacaaggatccttaaaagtagaagagaggttagaatcagaatgggagaaggagctatgatgacaaaagcaaggtcagagtgatggtgctgctggctctgccaggggaagggtcaccaggcaaggaaggcgggcggccctgagaagctggaaaaggcaaggagatgaattatccccagagcctccagaaagcaagagtcccaccagcgccgtgattttagcccaagaagactcattttggaattctgacctccagaactgtgagataatacatttcgtgtggttttaaaccactcagtggcaattcgtgacagcagcaataggaaatgaatccattatgctcccaagaaacacagtgtgagaaccactgcctttgcaggtttgctctgatggcagttctttttatatcattggcttgtctatcaaacttctcaggtgcaaaaaggaatcgtaagaatcagggtggggcctgagcagggagagacagaatcagaagacggagcacaaaaggagggtggtggtttggggagggcggtcacccgtcctagtccgctgtgtggaatgatgcacaggtgatgccgttgaggagcagtggggagggaggctgggggtgctgagagagacatcagacagagatgcagtcccgaccctttgcaaaggagaaacggaaggatggaaggttgaggggagccccttagaccaccgtgctgttctgaaactgtttgcagagctgttaggcattcctagggcccaagctgcctggcaggggatctggctgtcttgcaggagcaggcctgctttactgtccctgccacacttagttaccaattgggagtggcctgtggagcgtgtggcctcagcacagatgtgaccatggatttcaggccagcagccattgcacggctacacttcccacaggtggagatctgagaagcacattttcatgggcaccacagtgatgtttcccagagaactgggaaatccctgtggcctggaggtttatcccacactggggactccccaaggccccagggaggccccaggcctcctctctgcccaggccatgagagcacatcagagcagtagctgcagtggagcatgagagaaagcaaagggcctcacatttcagagcagcctgcgttctcctgggccagctccattcccactccctgtttagacaatgactgcttaaggttcagactctagaaaatcattgtcgcccttttgctggcatgcatcctattctgacatccacctgccataaatataggggtcaggcctgggcacagcatggtcacaaataagcttcaattgcaaggaggaaggagctagagcagccatatggtgtttacatgttttccatgtcaatcagcaaagggaggagcaggcagatgcacgtaacgaagcaagtgtgtacagctttccccaaggtgtggtgtggttctgccgctaaggaggcacgctgcagcctggggaaggctggcttttcctaaaaggcagagatggggctctgtatgtgagagagacagaaaaacagaccccaacggtacccaccggggagggcagtctctatttgtgactgagatcagggctctaaggggatgtttttttaaatacaggacagagaataacaagtgcccagaggcagaaaataagaggctgtggagccaaatgccagtttatctctaacagtcaggttgggaggaggtgacaggtggggagtgggtggcagagatgacaggtgaggagggatgggcaggtagagaagggagtggcagagatgacaggtggggggtgacagttggggagggggtggtgaagatgacaggctggcccttctggtgggctggatgaactcggggggcggggagggatcaactcgggtctgcagccaggttccagcaggaagccctgatggggagaagtgggtcagctagagtagcacatacagaagctgattcctgggagcatctggtggtgagtggaggcagattccccaggcagtgggtctctgcacagtggagaaggaaggatacaaccgagtctaacagcaggagaagctctgaagattcaatcagaattgttgattttcctgagaacagttgcaataagctgcagggaagggctgctgagaaaaccaccaggagagcaggattcaggatgtaggaggtagccagccattcatgcatgcagagaacgtttattgagcatgaatgctgtgccaggaactgttgagcccttagatcaggggtccccaacccctggactgtaaaccagtactggcccatggcctgttaggaaccagcaggttgtacagcaggaggagagcagtgggtactcgggcgaaacttcatctgtatttacagtcactccccattgctcacattaccgtctgagctccacctcctgtcagatcatcagcagcaacagattctcataggagtgtgaaccatcttgtgaaccgcgcatgtgaggtatctgggttgtgccgtccttatgagaatctaactaatgcctgatgatcggaggtggaagtttcatcccaaaaccatctcccaccccaccctcattctgtggaaaaattgtcttccacaaaaccggtccctggtgccaaaaaggttggggaccactgccgtaaatgaccaggagtgtgagcaaatggaggagtggcaggtcccctccctggccttctgtcttatctttcttttcttccttcactgaagaatctgctacttgctggcccagccagggtgagtgggagatggacccgtgtgtgcctgtggccacacctgagcatcaggcggactctgggggtggaggagaggcgagagcatccactcctctaccccagccccaagaggtgaggcctgacccagagtgcagttacctgaaatgtgaagtattcatccgcaggggcattcatcatgttacagatctggaaggcaagaggagacaaatggtctgaaatattgtgtagtggagccctcttgatccacaaagcagaataagaaagaacgcattgggagtgaggatttcctacacggctcttgactgcttgcgggcaaatggacctcaactaggccacagctgctaacaactcattcaagatggcttccctgctgctaattaaatcactggaggatatgtggtaccgtctctgccccttcccactcccccagactccagggaatccccttcaaattcaaagcaacaggctgctcaggccaaggggaggagaaagctgagaaatcctagctctgctacagccagtatgagcagcagagctaggattgcttttcttcgtcttcttcttcttcctaaagtgagatttgggttagaagatgatggttaagaggcaggaggaaacagccagataagttttcagttacaccaaagtaaggattcagtgagagatatcactttacttagtggaattcacagactattgctcacatctataaggacaagaaatcactcaactttgggtcattttaagttttctgtaccttgggtcataatcacaaatggatcttaaaagaccatgtctttccaagagataattaaaatcatagcattttatttgattttattttttatattttatgagatggagtttttgctctgtttcccaggctggagtgcaatggcgcgatctcagctctctgcaacctccacctcctgggttcaaacaattctcctgcctcagcctcccaagtagctgggattacaggcacccaccaccaagcccaactaatttttgtatttttagtaaagacgaggtttcaccatgttggccaggctggtctcgaactcttgacctcaggcaatccacctgccttggcctcccaaagtgctacgattacaggcgtgagccaccacacccagctatcacagcattttaaagccagaagggatcttagcaattaagttcatactttaaaaaaaaaaagaacaaatggaagcctaaagaggttaagtgatttgtttaaatctatgggatggaactagaactgtgagctccagaatgggtgctggggaaatcagctctcctggctgggaattggggaaatccttggcttgtatcagttgccaatttccatggtcccaattctcttgccatgggagatttcaagctgccaacagtttaacaacttgctcacaaaagtcctaaaaaactaacaatctaacaagatctaagtaggctccctccttaaatccccacctcaccaaactctgcctgcctctcggccccaaggtaagtgctttctgagaataattgaatgaaccatgtctactatttttgtggtactcttacacagaaaatgcgagaatctttcaaagtttttataagcatatatagcctaaaaatttaaggaatctttcatgccatgcattaatttcatgatctaacttgaataaattacatcatttgatgggctgagcacccttcaactgtgtttttgaagaggcaaaaagcagcctattcttttttaaacttttcatcagcaattatctgttttagtcctttctttgaagaacattatgttctaaatgttataagaacatttacaggtgggtcaagaccttagaggcccaagcttttaactcaatattgaaaagttccacatcccacaccatccccaccccatcccccacatttatgctttaaaaaattgactgatgtacttgagatagaattaaacccagtcattaaatcatagtcattggattccaaagggtatctgaaatgtgtgtggctgcagaataagaaattgagggatggaggaacctttctcatgctgactaaatatttctgtgtagagttcagaagtctccagttaacctacatttgactgtcaagattcttctctcctttgtcctatgccaaaggaagtgatcatctagctttttttttttttttttttttttttgtggagtttcactttgttgcccaggctggagtgcaatggcgcgacctcggctcactgcaatctccacctcctgggttcaagcaattcttttgcctcagcctcccaagtagctggcattacaggcatgtgccaccatgcccagctaattttgtatttttagtagagacggggtttcaccatgttggtcaggctggtctcgaactcctgacctcagatgattcgcccgcctcagcctcccaaagtgctgggattacaggcatgagccaccgcgcccggcccatctagcttttattggatgcattcttgctttcacaattgtatctatctcttagctaataagagtttcttgcaatattatttaaaatttgaatttgttcaataacttacaaatccattttcagcaacatatgttggcaacccactaatgagtgtccagtggtctgcaggaggcgtccttggggaagagaagaaaaaaaatcattgcaatatagagaaatgcaatatgtgcagaaatacaacggcaactgcggcagcaacttcctgccaatactcacggaatcactttgatctcttcttttccatgtaaaatgtaatcaatgattttataaaagttgacttcctaagaaagaaagaggatattatgggaataatgttatttcccaaagaaatcatttttcactggggaacttgtactttaaaactcttacaaatagaaccttatttcccaaccacattatattataacataaattatcaaactacttatatcctgactacaaacttataataaaaccagaaatattattggctgtttatctacatgcacaggctaaaataaattttgtttttaaaaagttgaattgcccccaaacagcttttggggtgggggggatctttggctaccaaatcatcagagagtctgtttttattttcaagtgatcccttttgttgtccagaaatacccgacattaataacttcactagaacaaatcatgtaatttcttaactgtagtcagttttacattatatatagtgacccgtaccctcctttcatcagtgacttatctgaacaggtgcctcagaaacaggaggtttcactgccaaagctgaaagggactagagaattattctctctgtttcatggggcagatgatgaatctgaggcctggacacaatccatccccttctctttcctgtgtgctatggacacaggggtttctgccttcatgaagcttgcagtcaagggggaaagtaaacctaacccaacccttccttcgagattctaatcccacatatctgaagaagggcccaggtacttctttaaaatgttgtgcaggtggctctgatgcatcccttccagttgagaaccactggtctaccaagccctggctttatagaaaaggaaacggagaggttcaacaaggagttaaggcaggggccaatcagctctagcttggggcatagctgggactagaacctcaaactccttgtctagtgctgtttctactactccaggtcttcccaggccagtgctctatgcactgtggcctcttaattttagcacctgacaccatgcacagatggcatcaaggaagacatttgcacgtaccctgccatcaggtgtctttggacctttataaggctctacttctccaagcttgattggccattcatcgtagaattcctggaggcaattagatttaagtatcattaaacacactgttccatgacctaccatatcttatatgaattttatgtgtttgtatattttatgttaatctacgtaattctggaattttagtgctgaaagatctacaattcccagcaatactggttaggaatttttgactgttaacacgttacttaaccttttacatctgtaaaatagggataacaatagaatttgtactaaagaattgttgtgaggattaaatgaataatacatatgtaacatctaccctggcacatagttcaaaatactcaatgtatagcaattctttcatagacaattaagctaaatctggtttaaaaggcttggccaaggtcacacagagtggcaaaatgttggttgctttacccaacattcattctctgtcttttccttgctagcataacctgatgcgatttgagtatcaggtggtaattttccatcagaccacagcccatgagtggtctacatgaggtgcctagatcagtttaagggcaggtatgtggcccagatctggacattgaagaagggggagaagtctgctgagggactactggcaaaaggtattcctcagataaaagctgatgagagtgacatttggagaaaatgcctcccagttgtgtcatgcctatgtgccaatgatttgagctgcaacagccatctttccaccataagaggaggcctcaccaacacgctgcaggtagcagagaccttgccaggaagaaagagaaagcacctggactttaatgactgcactgatctctgaatcaaccagtactagtgctgccctaccttgttaagtaggagaataaatatcatattgttagagatgcttttagctgtgtctgatgtttcttatagccaaaagaatcctaaccaacatactcagctacaaagtcccagaaccaagatcagaacccagctctcctagtgcttcatcctatgtttatccacttagaacaattactctgaaaaaataacttccaatcacatgaatatgaagaaatataaataaggccaggtgcggtggctcatgcctgtaatcccagcactttgagaggccaaggcgagcggatcacttgaggacaggagttcaagaccagtctggccaacatggcgaaatcctgtctctactaaaataccgaaaatcagtggacgtggtggtacaggcctataatcccagctactgaggcatgagaatcgcttgaacctgggaggctgaggttgcagtgagccaagatcatgccactgcactccagcctggtgacagaccaagacagagtctcaaaaaaaggaaagaaaacaaaagaaaaaatatataaataatatggtatcgttagttattttgaactagaagggtagcaacagaattaaagaagatgacacaagggcattatattgtgaataatattacatgtttcaatatttctactttaattaaattttttttagaatacaaaaacctaaagttggtaaagataatattgattatccacctactgtgtaaattctagacactatgtacatatagtgtttatatatataaaaaaatataaaatctctaattctcacaattgataagagagatgtcctcattttacagatgaagaagccaagaatcaggtaggttaaaagacttgctgacaagaagaacaaaatcaaaaagctgacactacctgacttaagatttgccatgaagctgcaataatcaagacagtgtggtattagtgaaagaatggacaaatgaatcaatgaaacaaaatagagaacccagaaatagacccttacaaatatagttaacttggacaaaggcgcaaaggcaatgaacaaaggatagtcttttcaacaaattttgttggaacaactgaacatctacatgtaaaaaaagtgaatctagaaacagaacttgtacctttcacaaaaaataactcgaaatggattatacacctaaatgtaaaacacaaaagtataaaaattataggagatgacatagaagatctaggtgaacttgggtttgatgaggcttcatagatacaacaccaaaagcacaatccatgaaagaaaaaatatagaaaaattggacttcattaaaattaaaaccttctgctctacagcagacactgttaagagaatgaaaagataagccacagactgggagaaagtatttgcaaatcacatatttggtaaaggacttggacccataatatacaaataactcttacaattgaatgataagaaaacaacataataaaatgtgggcaaaaaatctgagcagctatctctctaagaagatatacagatggcaagtaaacatatgagaagatgctcaacatcatatgtcattggggaattgaaaattaaaacaacaatgagataccacaactgataccccaaatactaacatcagcaactgctaatacccaaaatactgacattaacaactgctggtgagaaagtgcatctggtagacatgcaaaacagtaaagtcactttggaagacagtctgccagtttcttacaaagatcaatttgtcttacagtataatccagcaattgccctattcggtatttacccaattgagttgaaaacatgtagacacacataaacctacctacaatggttatagcagctttattcacaatcactaaatattagaagcaaccaagatacccttcaacaggtgaatggatacacaaacctgccatacagtggaatattattcagtgataaaaagaaattagctattgagtcatgaaaagacatggaggaaacttaaatgcatatttcaaagtgaaaagccagtctgaaaaagctacatactgtatgattccaactatatggcattctggaaaaggcaaaaactatagaaacagcaaaaaaaaaaaaaaaaaaaactgtggctaccaggagtttggaaggggtgaggaaaggttgaatatgtgaagcacagagggctttgaggcactgaaagtagtctgtctgatactgtagtagcagatatatgacattacacatttgtcaaaacccagagaactgcacaaaggatgaaccctcatgtaaactatggactttagttaataataatatatcaatattgattcatcacaccacactaatgcaagatattaataacagggaaactgggagaggagattgggagggaagaggaaactccgtactttataatcaatttttctgtcaatactactctaaaaatagtctattaatcaatgtaaaaaaaaaaaaaccagacttgctgaaaacccatactactaggaagtgggaaaaccaagattcaagcctacatcttttttgctccaagacacacacttttacctctgttcttgtgatcaatcatgactaattatttacatagtgtatctgttttttaaggatcacatttcctgtgatgtgtgttttataggcgatgttagatgagaaaaaaatgtgtagaataataagaaccttctccttggtcatgtccaacagtccaatggagtatcgttcacagttcagatatgttctaaccgtgtagagcgctttgtgaaactgtcgctcaacatctgtgagttcttcaaatactttattggctgaccacataaggatctgaaagtaggtatcaaaaagaaaacagttagaataaagtatgctatggagagatagagcattcaccacaagaaaacatgaggtgcatcaaataaaataaatgcatatcattggaaagtgcaattctgattttgaacatgtgtacatccaacaaactactcagttcctctaggtgagatgatgagtagacttttgcaaggctgcgggtctatggagagagagaagctatgattggttcctgtgtctagatgttttggctccaaaggggaagtgccctgaaatgggatgcagggatggtccctgggtggagaatccagtattggtggcccactggctcctgctggccctgatgtggagagagccacatacctccttccatgcatcctgagctagttggaggtaaccttacctggagaattcaaacgggaagggacctccctctcaacctctactcgtgcattgtactggtgaggaaactgaggtccagagagtgggccagacctaggtatcttaggtactaatagtgccctttatccctctgtctcatggagttaagaataatatgctcctcaaattaataggtttaccatgacccaggaatttctacaagctttatgtgagagctaatcgctaatagtcacaacaaccatctgaagtaggtaccataattgtcatcaccatctcatagacagaaacgccaagtccactcaggatctagattgaagaaagccaagccagttgtgcacacaattggagagcttggggtgcagaggagtgtgggtggggatagtggcaggaagatcatgagaggacacgtgggactgaagtttggggatctgctccacgtggcttaaacccccaggaggaataggaggggtctgaatttgttgtctctgggcggttttgtcagaataggtcagcatggaatgactaatgctgccttccttttacctggcttcttcgggattcaatattgtacatgtagctggtgtgatgaagccttaggatgatagacacaaagttgaggtatttggaaaagacctacagacggcagagaataacaagttatggttgtgatatcttttctttggttatacaacaaataaatttcctgagcctccaaccagatgcccagggttagcattacctcttcatcctgtttggaaaattcagatgcatttactttgttaactgccatgatcacagcaagaacctccttgcccaccacgatcggggttgccagcaggttcttagtgacatacccagtttgcttgtccatgaagtcagaaaaatggctgttctgaaagagacagtcacatatttgtcaaagtggcacaaaatcatagagtggtagatctagggatgctgacagatcattctctctcatttaaatgctaccaacagataaccagggctccagtacagtggtccccagtaaacaatcccactccacctgccatcctatgactgcatagaatggaattgcccatttcagaataagcgctgccaacctgagctatggcctatttaggttaggctgaggttgggccagaagaaaagaggtgatcagacagccaagtggaaagtgaggtgctaagaggaagagaggggaaggcacaaggttacaatagacagcaagtacatgcagggaaggagagcacagctaggaatacagacacagttcatagagcgcttctctctcattacaaagggaaaacatgcgcttgaaatcatcaacccatatgtcataacataaagcaaaaattatcattgcccccagttccttccaatctagcctactagaagaaatccgtgctaactgctggtgtgtctcctatgcctttctctatgcttgaacaaagagttttctattttttctaaaatttccttttctaattgcttataataatttcatcacttaacaatgtcttagggacttccctgaagaccaatgcatacggatgtgaactcacctcttagattcgtgcacactactccaccctgggtgctttacgatccactcaactgtcctttactgattttgcctgtgtatagttttccccactaccaacaatactgcactaatccttcttacttttatttttatgtgacagattcccaaaaaaggaaatcccttttgctggatccacaggaacatacagtttttctttacatagattactttgatgaaaggttcacattctgaggctgggcagggtggttcacgcctgtaatcccagtactttgggaggccaaggcaggcggatcacctgaggtcaggagttcgagaccagcctggccaacatgatgaaaccctgtctctactaaaatacaaaaactagccaagcgtggtggcacgcccctgtagtctccgctactcaggaggctgaggcaggagagtcgcttgaacccgggagacggaggttgcagtaagccgagatcgcgccattgtactccagcctgggcaacaagagcaaaactctgtctcaaaaaaaagaaaaagaaaaagaaaggttcacattctaacttccactgaccctgtgtgaaaggaccaaggactaccctcttgccagcatcagatgcttatcaggtttttaatgttctaccaagcttatgtcttccattcctattttttttttctttctctgggagagaggaaagtggatcttcccagattcagacctcatagagtagattcgagagataattctaatccactggccatagcagaggctgagtaatgagtctggagaagcgcacaaatggaagggcttgagaaaaaggtcaaggaaggcaattatcttattagctatcatttcagagaatcgccactcacggcgggtttagacccagccttccttgggtcatgacattcttccctttgaacctaggacttcttcaattagaactgaacttcagccttaactctgagactcgttggccaaaattagtgcggtattcctcccacagttgtattattttcatttccctgtgttggcagtgcttctaaaagcagcacaaaccttgcagactggattctgtctggtttcccatagaaaaaaatgtgagaattttctgggtgtgtcatttccaggccagagtttccaccagggaacaagggctggttggccaatagaactcacagagctcaaatgagattagcagtcctgagatatgcctcagaatcacctgcagattaatgcagcagatgcactgaatcctaatctcctacagtggaacctgcacttttacgtggcccaggtaattcttaggctcaacccaatggggaatcactcctgcagaggatcaccagaaatggtaccgctctcagaggaaatatgtgatgtaaaggggataaaggcagcccctcactccagatctcttctatacctttcccaaagtggaaacacacaaaccaactcttgaggcatcagcattgcataaaggcaaggaaggtattggagtcagactttcttggctgaaactgggccccagtgtactagctgtatggtcctgggtgtgttacttaccttctgtgtcctcgttttgtaatctgaaaataggggtaatgcttccatctactgcctagaattcctgatgtgaagatagaataacataggataggctgagcacttagaaaaaaaaagagtatctggcacatagtattcagtaagtactaggaagagaaacttagtacttttctaggctttcctgaatgagaagtagttcttttgcaattaccattttgcttctagttttaatttttctagccagttcaaatcactgaagaaatcagatgcccgtagctggatgtaggcctcccataccgcggagcacccttcctccagaaggccagcacactccctcactcatgccaccaagaaccacatttcttttctatccattttatctgttacctctctctgtttccccatagcatcttcaccctcagaccaaagtgtctgcagtttttgttagattctttctcttaatccactgcttgtctaggccagctcccattgtttcccttccaccctgttatccatgcagatcacatcaccttcatttacacagcctgggcactaaaggaatcatcaaaataccagaaacgtgcaccatggggtgaagttagccaggacttctttctttcttttttttgagacagagttttgctctcgttgcccaggctagagtgcaatggcgtgatctctgatcactgcaggcttcaccttccaggttcaagcgattctcctgcctcagcctcccaagtagctgggattacagacacctgccaccacacctggctaatttttgtatttttagtagggacaggttttcgccgtgttggccaggctggtcacaaactcctgacctcaggtgatccgcccacctcagcttcccaaagtgctgagattacaggtgtaagccaccatgcttagctggcagcacttctttgcaaacacatttcactctgcagcttcaaacttaatgccattttattccagattctaaacacaaggaaatgttaagttcaatggactgttttgagaaaatggcttgtaagtttcaaaatttgatacttgcttattattgcatctgaaagccctagataaaccagccattaagttacaggatggggatgggggaggggtttttgtgttttattttcactagctcaaaaaatccttagcgaagtttctttgcataaatcctgcgtgtgtcccttgatggttcttcagagaagcccttgaaggcagctggagaacattgtttagagcaacaggaggcctgatccctcatcagatgtcagtattgctaaatcctgattaaacacccttaacccctgagatccaaagcagaagtagaggaggaaaggaagagagaggaaggaggacttttaaaccacagtcagaatcaggatcacccatagtttatggacagctttccgaatagagaaaaaaacaacttaaagaggatatctctcagtttcctgttgttaaaagtcttcctctcagcactttgggaggcctatgtgggcagatcacgaggtcaggagttcaagaccagcctggccaacatggtgaaaccctgtctctactaaaaatacaaaaattagctgggcatggtggtgcatgcctgtaatcccagctactggggaggctgaggcaggagaatggctctaacttgggaggcagaggttgcagtgagccgagatcgcgccattgcactccagcctcgtgacagagtgagattccgtctcaaaaaaaaaaaaaaaaaaagtcttcctgccttcaacttgttttaaaacaggcaataatcactgacccttttttggccaaccatatccagctcctaaacgcctactggcataatgacaatattatcacagctatcatttattgagcatctactatgagtcaggtcctttatatacatttaatctgtacatttgcttatctccatttcttaggggtagaaactccatcacacagttactaagtcacagacatggatcttcacccaggtctgtctgatgccacagccctctccctatactagtggcttccctgttaccttcatggaccctccaaggttgggagtatgtagttctgtacctttgtctaggtgtgagaagtctttccctcacctgcgcccacactgctagccagaggaaagttgtgtgtggtcagggatattatagaaagagggaggcctccaagacctgagttattgccccagatctgccacttcctgtctacctaactttgaacgattcctactacacaggctggaaataaaaaatatgatccttgtcagagaacgttgtttaaattgtcaagtgcaatgaaaggaggaagaattaatcagatgtttcatttgaaacattggtttctacttcctttcccgttgcaaatcttactgcagcggctaaagcacgtgaaactgcaggggtgtaaggtaggcaaacagcactggacacatactcagccacctccgttccaacccttctcatccacagacacacaccatggacccgggggagatacaactcctatggcctcaacttcctgtcctccataggacagagttgggctaaagacttcataagccccttccatctctaatattccacagttgatttgaaattcacttcctcctcctgtatctgcttacccaagagaccagtggttttcaacattggctgcatattagaagaagctgggggagctttttaaaaataccaatgcctgggccgggcgcagtggctcacgcctgtaatcccagcactttgaaagtccgagacaggtggatcacctgaggtcaggagttcagtaccagcctggccaacatggtgaaaccccgtttctactaaaaatacaaaaattagccaggcatagtggcgcacctctgtagtcccagctactcaggatgctgaggcaggataattgcttgaacccgggaggcagaggttgcagtgagccaagatagcgccatcgcactccagcctgggtgatggagcaagactgtctcaaaaataaataaataataaaataaaaatactaatgcctgaattctaatctttgagagtccgctgtaacactaaagccaccaatatggttttgtggattgtgtttattttttgagacagggtttcattctgtcacccaggctggagtgcagtgtgtgaacacagctcactgcagagcctcccaggctcaggccatcctcccatctcaaccttccaagtagctgggactccaggcacacaccaccatgcctggcttatttttgtatttttggtagagacgggggttttccatgttggccagcctggtctcgaactcctgggcttaagccatccacccaccgtggcctcccaaagtgctgggattacaggcgtgagccactgcacacagcttaatatggttttaatgtacagccagagttggaaatccccactctagagagaaaaaaatgtgaagaagcagttgaaatgaagaaccaatgaggtctcgtctttctcgtgagcacagaaccgtatgtgtcttcaacacacatttctctgtgtcccacccagaacagccaggagtcctccagagaagagaggagagactccccactcccagatgaagtgctccgtccatgccgtgatgctcaccatggacagccgcagaccaaaaccacctccaagcagctccatgctcttatttccttctcaccacagagaactgggctcatcaaagtataacagcagaaatcattttacccatctcttctttaaaagcctttcaaaaaattgctgaatgtcactttttcaagtttgatgtgctagcagggatgggctcagttggggaccctcaaggagcgtattcccatgagaaaaacctcaggatgtgcagacattgccttccagttggttgtctagagaactttgccctaaggatgagcatccatttagacacttgaagcagctgcagtcaggctcaaaagcaaatttaacccagcttaaacttactgaaaggaggaattattcaggactgaagccctaccaggccccatggtaacccttgcacctgagcggtgttctgtggttgtttgcagagagtcgctcgtgtttgatgacttccacacctcttgggtccgtgtgaccctccccctataatcagcttcaggaggcatttaggagattatcctcctgcttctccagctgccctattcacccctgcacagaaagcatttcacaagttgttcccattcaactctcttccatcataatccacttttccctttttgttaatggtaaactgtaataatggaccacatgtgtagagaaggagctgccaggagaatctccaagctggtacccttgattattgctgaggggagggatgatgggtgattagcatttcctcctctggtttatttgtatcttataattgtttaaaaatgaacatgtactctaatggtaagaataaagtttttctatttctataaggggcatctcaatgccttgtatttgtgcagtatgctgttggtcttcaagagggtccaaatgtcccacttacatgattggaattcattcttgaaagatctgggttatagagcagtgggagtggtcaattgcacttaaccatcacctaaattcacatatgtaatgaattccaaatttgaacatctgaactttcaaatggcatcattttttctctttgcacatttggtcgatagatgaaagaattgatttactagcaaatccatccaaaaaacctgaatgttttcaaaggactgtgaatgagaggcatggggagcagttcacaagtcttggcatctgggcacgttggcccatctccctagtggggtagtttgttttgctggtgttgctgagaaggaaagtcccccagagcactggaggaggcgtaagggagggtgtgtggaatgcaccaggtccaggtaggatcacctgataaaatgccaaactttacatgggacatacttatacttcagaaaataataattcattgtttatctgaaattcaagttcaactgggcaacttgaaatttcatttgctaaatttggcaacactaggcctgggtgatcctcttccctgccacccacattcccccggttattgccaaactaatgccacaaggatagcactatctctctttcccatttgttcctccctgaccctgccaagacctctgccccactgtcataaggccacctacctttttcacatctgggacattatgagttttcttcgtgtgagcagcccaacccactatcccaatgtccaatggaaacacaacttctttgtcagggcccaccaggttgtcctcaaacttggaggttggggtgacatccagcaacctagaggccacctcaggtatgccgttccgggaccggcacaggaacatgctgcagcggtcagcctggagcaggtgggccagcctctgcagggccctgtgaaccccctgctctggggtgcccccctcctcctgcacggtccacagcagctccaagcacagggccgactcctccacctgggtcagctcagagaaggacatgctggactggactggcacctggctgttcttgaagatttctcccagcacctccacccgcaacttcctgtcaaagtactccttggcaaactgagggttctcctccaggtatttctccacggcatcttggttgatctcacccatggtgtggcttgctttgctgcgtttgttcagaaaggacgaccttcagagcactacctgaggcagagtgatgagaaggaaattcatcctggtggaaattactgaggaaaccgtaaatggtccctcataggacttccaaaggtcaagcagaaagcagagctttcaaactgcctgtaactcttgggatgtgacagaaggccctggcttagggtgggattcaggaagcacaggattaaagagttcttcaggacactaaatccctgagcattagtagctcataagtccctagcgaatcttcagagtatcttagatcagcccagcaagtagcaagctgaggtgtctattccagaaaaataactgaatgtcggctgctgtccacagcaaggaagaatcactgacatatccatgaatgacacgacattggcaacaattggcactttgaatcgttcttgtatgatagctataggaagtaaaactatttagacctcggaagtgcttggattttttttgtttatatagcaactgtaatgaacatctgggagatatggaacagtttgcatcactgcaacataaaggtgaatattaatctttccttttcttaaaagtcttttgatcaccaaggttgcttggcctcctctttctctagaaccttcacctctcaatccctgtcacttcagaaagcttgacctcagaagtgttttaaaggaataaacctcaagcttattactaaagaggtgaacatagcaaaatatttgccaatgatccaaacctaatcaagtcatgaattgaataataacccttgtcgagagactataattacaaaaggtaacctacatagttgctggctgggtttttctactaagtatcttagttaggattttgttttcaatagtaatagccagaggtcatgcgattttgctacaacatacagtctactaaatctactagatgatagatatcttgtctgttgctaggatccttaacgtctcaggggctactggcatagaaagaacacttaccactacttagttttgtttaatgttcactttactaagcttttacatctattaaacacatttcctcaaatatttaaacactattatgcaactaataattcaaactattaattcatgaaccaattgccttcaatacttaaatgttggtttcaaacttagtcaaggtgttttaaacacttcaataaagctacaaacctaatatgacaaattctcttaagtggaaaacacacacatgttacagtgactctaaaaattattgttacacccacatttaagtttgcttcaaaaatagaaaccctatgagtttcattgagttctctaagatttacctctctagatagtaatctttttcttttcttttttttttttttttgagactgagtctcgctctattgccaggctggagtgcagtggtgcgatctcagctcactgcaacctccgtctcctaggttcaagtgattctcctgcctcagcctcccgagtagctgggactacaggtgggtgccaccacgcccagctaatttttgtatttttggtagagatggggtttcaccatgttggccaggctagtcttaaactcccaacctcaggtgatccacctgtgtcagcctgagagatagtaatcttaatagtcacaaaagaaagagagatccgttgaggttgcacattccctgtcatgaattgagagattcttggtgggaaacatggttttcccaggggtacagaaagagtcatttgttgagttatgccacttcttgtgattgagcttcacctgctacctcaaagcaccttgtcaggtgcacacattttcttggactgttctatgtcacactcaactctactctcaggaggttcctctttggatgactatttacttcataacaccctattataaataggataatgcagaagtgtatttcccaggagagagttgagtcaactgagtcacccctcctatgggaccatcttccttatctaacaattttggacactcttttttacctagttattttgtgtgactcatggtacagttcctacttctcctgtaagtatgtggtgtgctcacgatttcctggtttcatccttccctcttgaaacagagagggaaaaacacatatttgcatttcatatacggacttatacttaatagaaaaagaaaaaacaaaatgcccatatatgttcaactttcataatctctttttttttttttttgagacagagtcttgctctattgcccaggctagagtgcagtggtgcgatctcggctcactgcaacctctgcctcctgggttcatgccattctcctgcctcagcctcccgagtagctgggactacaggcgcctgccaccatgcccggctaattttttgtatttttagtagagacggggtttcactgtgttagccaggatgatcttgatctcctgacctcgtgatccacccgcctcggcctcccaaagtgctgggattacaggcgtgagccaccgtgcccggccgatctttcataatcttataaaagtgaatattaatttgaaaaagaaacatcctattatagtcagcattcttttgtttttataactagttagagattcattcatttgttcattctttctttctttcttttttttttttttgagatggagtctccctctgttgcccaggcgcgatcttggcttactgcaacctccgcctcctgggttcaagcgaatctcttgcctcagcctccggagtagctgggattacaggtgtatgccaccatacctggttaatttttttgtatttttagtagagacaaggtttcaccatgttggccaggctggtctcgaactctttaggtaatctgccctccttggcctcccaaagtgctgggattacaggtgtgagccacttcacctggcctcatttgttcattctttcaacatttgtctattgattgtctgttataagcaaggcaccattctagctattgtgatagagacttcaagttccccttatattatatgattgtttccttctcccagttacatgggaagattactcttcctccctctggtacagccatatgactgattttaacaaatggtttgtgggcagaaatatcactttcagacaggaacaattaattgccaacgggaggctctccaggtctctgttccctctgctgccacatcagtttcagatgaaagggcccctgaatcccagagtgaggatgtcatgtaacagaggcccctggatgacccgagatggacatgtagcatgatgagaaataaacttgtcttgttttcagcctcggagacctgagggttgttgttactgcagcatcaccaagacaattctgacagttacacttctactgtcggggactcagggggtggtcccagcattacaagcacttgtggtgtgggaagggagataagactagtgcataaaaagccatgagacatagaacagaatacaattaatgctggaagtgaggtacatgtacatggctatcggagttcacgaaagagatcatatctagtgtggctgaagacagggtagaaatcaagagtgttcagaagcaatagcatggggtgtagggtaatacagggaggacagtgagaggtgaccctgaaaaggtgggtcgggcccagattagaagggcctcaaagcctagactgaggattttgaatcctggaaaatttttgaagtgggaggcaacattattagtgttcttctttacaaacttaatgaggaagataacttggaggaaaacaaaatactggacattgggatacagattaagatactttattgcatttggctcattatcaaacaacctaaaaatgtgtataggctttgaccccacaattctgcttttatgaattcatcttagagaaataattaagaatgtatgtgattaatatagttgcaagggtgcttaccatgagtgtgggtataaaagtaaaagatcagaaatagcctagacacttaatagtaggaggttgagtaaataaatggtattagatctgtaaaatagaaagctacgcagctattaggttggtacaaaaataatagcgattttccccattacttttagtagcaaaaaccgcaattacttttgcaccaacctaataatattgttaaagtctattgacatgaaaaaatatttatgatatgcagttaattacaaacagtattgcagcataattccattaatatgcacagacagaggtatatataccaaaatattaagtgaaattatttcaaggcaggacacggtggctcatgcctataatcccagcactttgggaggccgagacaggcaaattacttgaactcaggagtctgacagcagcctaggcaacatggtgaaaccccgccctacaaaaaattacaaaaattagctgggcttggtggcacatgcctgtagtctcagctgagactgggactgagatggggggatggcttgagctcaggaggtagaggctgcagggagctgtgatcgcaccaccgcactccaacctgggcgactgaaaaagaacctatctcagaaaaaaaaagttatttcaaagtggtgggattcaagacattaatttttttcttcttttttgcttacctgatttttgtaaagtatctacaatgaacatatatactttatgtaataaagaaattaagtcattcataaacaaagattttgaggttatctctgcagtctatgggtgaagttgcttgggaatgaaaaagaaaaggacaaatgtgagacacaatccagcaaatgtgtcatgacaattgacaggacgaggcaattgattagttagaaaaagcacacaagagaaggcgtcactgttaactactttgagtgttgagcgaagttatggactgaacgtttgtattcccctaaaactcatctgttgaaatcctaacctctaatgtgatggtattagacggtatggccttcaggatgtgactaggtcatgaggatggaaccctcacaagtggtattagtgcccttattaaagggcccccagagagctctccagccctctttcttccatgtgaggataccaggagaagatggctgtctgtgacctggaagaggaagatggccatcactgaacctgaccatactggcaccctgacctcagacctccagcttccagaactatgagcccctccttctatgacactttgttatagccacctgaactaagacaaatgacattttatcaaagattttaaaatgggtaatattagaagcctccttttagcacacacaccaatagccttttctttctttcttgttcttgatgaagtcctgtgatttccatagctcttcctcttgggatagttctttgcagagcttcttgccagtgttagcaagatctttgtgtctcttattggctgtctgctactaggcactgaaaaaaacaaaatcaatttcagaaaataacatattttattttttaaaatgtctgattcaggtggtacatgtgtaggtttttatatgggtatattgcatgatgctgaggtttgagcttcagttgaacccatcacccagatagggagcatagtactcaatacgtagtttttcaactctttcctttgtccttttggaggccccagtgcctattgttcccatcattgtgtccatgtatactcaatgtttagctctcacttataagcaagaacatgtggtatttggttttctgttcccgcattaattcacttaggataatggcctccagctgcatccatgttgctgcataggacatgattttgttttttgtatggctgcatagtattccattgatgcatatgtaccacattttctttacccagttcaccgctgatgggcacctgggttgattccatgtctttgctatagtgaatagtgctgtgataaacttgtgagtgcaggtgtctttttaggtagcgtgatttattttcttttgggtttctactggatagatacccagtaatgggattgctgggtcaaatgggagttctattgttagttctttgagaaatctcaacactgttttccgcaggggctgaaccaatttacaatcccaccaacagcatatgagtgttcctttttctccacaaccttaccaacatctgctattttttgactttttaataacagccatactgtctggtgcgaaaggttttgatttgcatttctctaatgattagtgatgttgaacattttttcatatgtttgttggctgcttgtatgtcttcttttgagaaatacctgtccctgtcctttgcccactttttaatggggtaatttgttttcttcttcttgatttgttttttatagattctagatattagtcctttgtcagatgcatagtttgctaatattttctcccatttcgtagagtgtctgtttactctgttgatagtgtcttttgctgtgcagaagctctttagtttaattaggtcccacttgtcaatttttgtttttgtcgtgttttcttttgaggacttagtcataaattctttgcctaggctgatgttcagaagagtgtttcctaggttttcttctaggatttttatagtttgaagtcttacattttttttttaatttaattttatttttattgatcattcttgggtgtttctcacagagggggatttggcagggtcacaggacactagtggagggaaggtcagcagacaaacaagtgaacaaaggtctctggttttcctaggcagagtgtttgtgtccctgggtacttgagattagggagtggtgatgactcttaacgagcatgctgccttcaagcatctgtttaacaaagcacatcttgcaccgcccttaatccattcaaccctgtgtggacacagcacatgtttcagagagcacagggttgggggcaaggtcatagatcaacaggatcccaaggcagaagaatttttcttactacagaacaaaatgaaaagtctcccatgtctacttctttctacacagacacggcaaccatccgatttctcaatcttttccccaccttgcccccctttctactccagaaaaccgccatcgtcatcatggcccattctcaatgagctgttgggtacacctcccagacggggtggtggccgggcagaggggctcctcacttcccagtaggggcggctgggcagaggcgcccctcacctcccggaccgggtggctggccaggcggggggctgaccccccacctccctcccggacggggcggctggccgggcgtggggctgacccccccacctccctcccagacgaggtggctggccgggcgtggggctgagccccccacctccctcccggacggggcggctggccgggtggggggctgacccccccacctccctcccggacggggcggctggccgggcagaggggctcctcacttcccagtaggggcggccgggcagaggcgcccctcagctcccggactgggtggctggccgggcggggggctgacccccccatctccctcccggacggggcggctggccgggcgtggggctgacccccccacctccctcccagacgaggtggctggccgggcgtggggctgagccccccacctccctcccggacggggcggctggccgggtggggggctgacccccccacctccctcccagacggggcggctggctgggcagaggggctcctcactgggcagaggggctcctcacttcccagtaggggtggccgggcagaggcgcccctcacctcccggacggggcgctggcctggcgggaggctgacccccacctccctcccggatggggtggctgccgggcggagacgctcctcacttcccagacggggtggcagccaggcggaggggctcctcacttctcagacggggcggttgccaggcggagggtctcctcacttctcagacggggcggccgggcagagacgctcctcacctcccagacggggtcgcggccgggccgaggcgctcctcacatcccagacggggcggcggggcagaggcgctccccacatttcagatgatgggctgccgggcagagacgctcctcacttcctagatgggatggcggccggggagaggctctcctcacttcccaggtgggacggcggccgggcagagacgctcctcactttccagactgggcagccaggcagaggggctcctcacatcccagacgatgggcagccaggcagagacgctcctcacttcccagacggggtggcggccgggcagaggctgcaatctccgcactttggggggccaaggcaggcggctgggaggtgcagaccgtagcgagctgagatcacgccactgcactccagcctgggcaccattgagcactgagtgaatgagactccgtctgcaatcccggcacctcaggaggccgaggctggcggatcactcgcggctaggagctggagaccagtccggccaacacagcgaaaccccgtccccaccaaaaaaacacgaaaaccagtcaggcgtggcggcgcgcgcctgcaatcgcaggcactcagcaggctgaggcacgagaatcaggcagggaggctgcagcgagccgagatggcagcagtacagtccacctttggcccggcatgagagggagaccgtggaaaggagagggagagggagacgggagagggagagggagagggagacgggagagggagacgggagagggagagggagacgggagagggagagggagaccaagatgatgtttttgaagtcttacatttaagtctttaatccatcttgagtcagtttttgtagctggtgagaggtaggggtcaagtttcattcttctgcctatatttagccaattttcccagtaccatttattaaataggatggaaaatgacatatcttaaaatttaaacttaccaaacagatcacttagaataaatttttaacatgacaaaatgttgacttcactgtttaatttttacctcagtgcttctgtttcattcaaagcatagatttgttgtttgtttttttttggatagaatattaactgatggataaaatgaaggaaaaagtcaaaatcttagatgctaatattttttaatgacaataaatttatttagataaactctgaaatgataactaagtcaatgtgaaaactccactgcatttacatagaatttttttaagaaatgtaaaccacctggtaataataaaaggctaataagaatagataacatacaaaatatatactctgtgacaggtaccctcctaagatccttacatatattatcttatttaattttgggggggtttttttgagacaaagtttcactcttgttgcccaggctggagtgcaatggcatgatctccgctcaccacaacctccacctcccgggttcaagtgattctcctgcctcagcctcccaagtagctgggattacaggcatgcgccaccatgcccagctaattttgtatttttagtagagacggggtttctccatgttggtcaggctggtcttgaactaccgacctcaggtgatcctcccacctcagcctcccaaagtgctgggattacaggagtgagccaccgtgcccagcctatctcatttaatttttacaatcttataaggtacgtaccattatcattttacaggtgagaaactgaggcacacagaaattaagttagcttgcccaaggtcatagccagcaagtgatagtaacctactctaaaactaccagtttaaatatggctcaattaaaaaatgtgcacatgaggtgaactagacatcgtacttgatgctagagggagatatacaaagactctttctttgaagattttgaaatctagacaaatatcataaaatgttaaatactaatacaagagtgaaataaaaattccagacaatctttttaaaaatccaccaaagaatgatttaacttccttaaactttctgcttaaacaagttttcagtagtactctacataaatgagcacgcgtaatttctaattccatcattgttaaatttttttgctgcagttaatgacttctacaggaagttatgcttatacaatagccaaaacatatgcctacgaggtagaagcaccaacacagaaatcaacaatatcctgggctaattaagtgtatttcacattattattctgaacccactcttcagttccaccttagccagattatctgttcctataattacccatcatggaaaggaccccctgtaggtaggaatttcaggcacatctggcagccaactgcacaggacccttccatctgcacatttgctctgatgaaagccctgtgcttgcacttaattgggggtataaccaggtatctcagagacaatttggttggtgaaaaccatattatttttatccaaattgatgtgatggtctgatgactgcaaccactgagaacaccgtattgaaaaaattaatttatctctttgtacctgaaaacatggactgactaacctttccatttttcatccaattattttgacatcttttaaatgcagtcaaaagataaatgctgctccacttcctggtttttcatttttcttggcctcggtccagatgtgggtataaatgttactttgtataaaatggagctggttgctagtgcttaattttcatgagggtaaggacacaaatgtcttgcattagttctgtgagttatggtaaaacccttttcagtcttttttaggagttagtgatgtgtttgatgctgtgaaggttaaagtaacagcaacttctgttacaggtaacctctcaaatctcagtagcttcatccagtggaagctcatctctcattcacataaagtcagtcaccagtggggaccctggcagataagaggagaaaagagaggatgtgaacaattgaacaggcagcttttctgagctctgcctgggagtgacacagccccttccgctggccagaaggctcgtggccttatagagcttcgggaagtggggacggggaaggcaggggctggcagactggtagtccccaactttacagcatggaaggggactgcaaattttctggtgaaaggccaagtagccacctctgctacaagtactaaatcctgaggaattatatattagaaagggtgaactctgaacaggtctttaaaaataaatgttttatggagtttgcatagagtgactaatttcagtaaaagaaattatatctattgattaagcacctactatgaacaagtctcttgatatacccagtggaaaagtggggagaatggggacaggtacaaagatgaatgaaagaaacatggtctgtctctccatgaagcatggcaaggaaatgaatgaaattttgtgtacattatatatgatctataagatgtaatttaaaacataattttacctacagaaaaaggagcaagaaaaatatttgtaaaggaaatatttgctttattttctgattcacattttcatcatagaaaattttaaaaatacaaaaaggcgcaaagaaaaaatctttcagtgtccctaatcctatctcacagagatattcactatgaacatttttccttttgactttacatatacacatatttgaaaagttaatgtatgaggattttttccaaagtactgaagttaagaacatcagttgacctgaattaacttatttgtaatcatgaagaaatcctagaaagaatgccaaagtaaactgttttcctctgctggtatctggagcactaaggtccatgatttatcattaaaagaggaggggcagaggaatggttacaccaactttcttttttcttttttcacctcaaatttttactctgaaacaacctttaaacacccaacaaataaatgaaaacttgttgccgcatcaaaaccatcatcaaaatgaactgaaatacccttcattattcaacctacagtgtgtgcaagggccaccagaatgtgttctaggagaaatggctgcaaggccagggggtattaggagaacgtttttggcaggaataactgtccaaaggcaactgggctaagctaggagctctccatcactaaagaacttggagcaaaaactggaagacctctcctctggaatgccgaagaggggatccaagtattgggcaggagatagagaggtgccctaaaatcctttcccacccagggtgcatagatatataccccatagggtcctgcaggagacggtctgaagcagaacttatttgagctgtttgggattacacagtcttctataaaactggcccaatcagaagatttcctagttagcttgttgtccagaaacaggctttcctagctctgcggcggttaggagttaaatgcatcaccgttggctccccagacactgctgggactcaaatgggtgcaagagtgaaggggaaggtgggaaaaaagatggagaagcaggggggaaggaagccacagatgtcatcttttcaggatgctcagaattagccctaatgccctatagataaaggattggtctgagaaccaatcaactccttatttctgtttggcagccaccttcctcttccccgatctcctcttatttcaggtcgggctgcagcaaaatggcccaaattgatctcgaatctttccaatttaggccatggagacacaatcgatattgtatggaaggaatctcaagaagagatacttctttgccacatcatgaattctcattccgtcattctcatcctttgactggctgctttgatcaagcgagtggaactcttaacttcgaacagaaagagaaaaacagggtcagtaaattgtgccatcacacaggcaaaatacctaaactagtcacactgttttgattcaattggctactgaagttatagaatgttgtttactcttctctcctttgtctactccccagccaacaaaacaaccaaccttagctgttttgaaaataaatgaaaattccaacatgggtttgaaataaaattgcatcataaacgatcggtaggtgtttttcaaagtggtttcagggaagtgccacggagtaagcaggcgaccaccgaggctgctaaaatatttcctgtcctgaccagggttgcgtttctggagaatatttaacagggagggttttaacgcttttaaagatgttgaaactaaagaacaaatattgaccagagggcaccacaacgctcctgaaagagagtaaaatacatcctttataaaatgaaaaactacttggatgaattattccaaaattcctgcacaagtggacctcagaaggcagacggaggcgccaatttggcatggccagggcctgggcactcacgcaccagggagcctcgcgggtccgctctcgctctgtgaggccacggtcttcccgccaggttgactcgagcctcctgccagagccactggccccggaggccaccctagaccgcagctggcggccgctggcacgagtgcagggtaactgagccagggccgctggcgcatttggcctggccgaggccaccccgcgcggccgctccactgtgcccgaggctgtcctggaggtgaggccggcccacagggaccctgcccgtgcccgggctccggtgagtcagggcgcgttatgcaagtgcccccggcgcctccccttcggtctttcaccccgcgcggttacgaaagcgcgaccccctccccccggcgctataaagcagcggggcggccgcggcgcgctcgcctccctcgctccacgcgcgcccggacgcggcggccaggcttgcgcgcggttcccctcccggtggtgagtcgcggccggggtggggtggggtgaggtgggatacggcggcccgggggtcgtctgccgggcactgacggaggcgcatctcccgcagggcggattcctgggcaagatgaagtgggtgtgggcgctcttgctgctggcggcgctgggcagcggccgcgcggagcgcgactgccgagtgagcagcttccgagtcaaggagaacttcgacaaggctcgcgtaggtatcggcccagggggcccaggcggcccaggtccccaccccatccccgccctccccgcggcccgccgtgcgcccccggacgccaaacccctgctgtcatccttctcacagttctctgggacctggtacgccatggccaagaaggaccccgagggcctctttctgcaggacaacatcgtcgcggagttctccgtggacgagaccggccagatgagcgccacagccaagggccgagtccgtcttttgaagtcagtggccgccggggcagctgcgccctttgcgctccagggtcccccaagggccctgcctgctgatcgccacgtgggcattgtgaagggaagggagcaccgaatgggtggagggagggaggaagccctttgcccggcttggctgaggatccccttggcttttgcagtaactgggacgtgtgcgcagacatggtgggcaccttcacagacaccgaggaccctgccaagttcaagatgaagtactggggcgtagcctcctttctccagaaaggaagtgagtagtcagctctgtgggactgtcttgggaatggggcccctaccgggccaaatcgctgggtttcttctccagaggaacctacccttaggaagaatggcctgcggaaaggtctggaagtggcaggaacccgcagcaccacctgaggttaggggaacaagattgggagcagctacctaccccctccccaaacctcagctcaagaaacctggcctaagctcaaaaggacctttcggtttgtcaggtgtcattttccccaccagccactgtgccaaggtgtgtgccttctccatgctttctccttctgtctttcacatcaccactccacctagctctgcatttcctccgtctctttgggctgaatccctgagacagcttgactatctggggctcccacagaggccgagagagccctatccaaggacggagggaacactgtgcataggggtggatgcctcccaagtgcctggcctgctgatgctgagattctgagccaggcacagtgtgctgtgactgtggcctcttccctttccactaagctgtgaaaatcagatgtggaggggagtgatgttgaggacttgtagaagaacatcctgaaatttggcctaatcatgagaaaacagtgtctacatgctctttttcccattttttcccccatttatcctaagtttcaaatcaggaacctacttggtagctagagaataatgcaggccaggggacacatatcatggaatcttagagagggagagttaaccttttggagggggttcaatatgtagatgaataaactgaggccaagagaactttgcccaaggacatgcaacaagtttgttagagccaatgtcagaagccaggcttccaaatctcaggccaggatcaggtggccctgaactgcagggactcctaatccagaccagcttttgcaaagtattgtttgagctcttctgtgagataggaccaagggttgttcagggagactctctctgctcggtgatccagggtagaagtgtcctttattgtaaccctttgctctccatatatggcacaccacactcttggacttcctctaaagttgtgtgttggatgaaattgcatttttaaattttatttaatttttaattttaatttaattttttttttttttagagacagggtctcactgtcacccaggctggagtgcagtggcgccatcatggctcactgcagcctcaacctcctgggctcaagccatcctaccacctcagccccctgagtagctggaactacaggcatgggccaccatgtctggctaatttttgtattttttgtggagtcagggtctccccagcttgcccaagctggtcttgatctcctgggctcaagccatcctcccatctcggccttccaaagtgctgggattacaagtatgagccaccatacctggtagagaaaaagcttagaagctttatttttatttattatccttggaaataataaaaattatttcaaatagtgcagcaaaacatcccaaagtgatttagagtaaaatatacttttctgataatggattacaaaaatcaataccagaggtacaagattactaatttttagaaagaggaaacacatatgttctatagcattttgagatgtgctccttaatggactaggattctgttggcaatgcctttaggcacagggtcagagaggacccaatgagaagggagcattttgtttcttgcctcctcccccatcaaaccagattagtttgcttttgtctcttgtatattggtattttatcaggatttcatttggagggcgaaaaagtactgccatcttgaaagtgattgctatagatattaagtgagatgactataatatggaaggcttaaggataaattccttcttagggtacatgtcaaaaaagaagctgtgcagtgttgtagttaagcccgcccggttaaaattagacctcctaagttcaaatcccaactccaccactacttgtggaaccttagatatgttccttcacttctctgtgcctatttcgtcatctgcaaagtgaaatgatcatagaacctacctcatagagttgtgttacaagatgcaatgagtcaacaggcagaaagcactcagaacagtgcctgagacatgagttctttgtaagtgtttgatatgatggctgcttagttatctccctggtcgtgaaatcatagctttagattctgggtctagaatgggaggacccatggagaccactgggttcaagtctcttgttttagaagtgaagaaactggggcccatagagaagtgactggcctaggggcacagggtgaatttttggcacttagtgacacctcttaacccatggcttgtaaaaaggcacaaacaatccctttgttttctgagtatctcgcaaatggcatggcttgatgcacctaccttgttctgttttacatgcttgttttggggtcatcttaacaaactctactttcattcctcgtgccagtttcttccctgaccatggtcttgctttaaacactgacttggacggagggatttgaaggccactccaagagtgggctgcatcctcagcctctcccctgctccacacactgcatctcaccaaacggatgtgtttaaaatgaggtgcgcttatggagagaaagtaactcagggccaaacgatcatgaaatttgttgtcgaattattttaaaattaaatgtgatcaatctctacagttgaatgtcagtgttaacagactgatgtggcttgctgctccagccttgggcatgctccatactggtcttcccttctggctccaccagcagcaagcaggatgtctcaggggttgaggatactaccatcagcaggtcttggttgaatacaggctagcctccctgagatttgacttccttcactatgaaatggggataaagaatagtttctatttcatagaatcattggaaggactaactaaggtaatttgtgaaaatgcttagcctagtgcatagtaagtgctcaataaatattagttatatcatcattgttttgtgctcttgcagaaagacctggacaaagactctccttgtgtccttctgtcagatgaagtctgtcactctgctagtaaaggggcccttgtcagactgaataacaatgcaagcctgaatgtttacattagtgttgcccaaagtcagtgttcctgctccatctatatctaaatacactagggtgcttgttaacaaatgcacatttctggactcaaacccagaattatggagtcagaaattctaagggcacggccctggaatctgcattttaagtatgctccttgggtatgctgtttctgcacaatgaagtttgagaaccactggtctagataattcaatctgaagagtttggcttactcaggtatcaaggcctcagactccactcacttttctggggcctgttggggtattttgacaatgcatcggaaatagcattaaatctgttgcctggctggctcagctggactgttaggcctgagaagcacagggagcttcccacctggtcttgctgctttagatgattggagcatgcaggtttagggagccgaaaggacacatgccaggcccacagcagtgagcaacagaacagaccaatggaaccaggttgcccgagacagcgccctctaccaagcattttctttggttttgggactggcagtccaaaccgctaaaccagtctgtgtaggtacagtatacacacagctgcagcgtgaccccacttcctaggatggtagaggggagacaggggctcccagccacacagccactgcctccaacgctctctgtccctagctccactgcatgcggttagctgcagtctggaaatggctgggggtgtctggttctccagaggagccctgcccagctgccgggtgtgaggaggttagagaaccaacctcattctcgcagtgctctggcagatctcttgcaaatactcttaaaagggagagcctggtcaaggtcactatgatttaaattcctcgtctttgaattattcagccaaaagagcctggagattaaccaaaccaacttaggccttcttttaaagtcaagaacagtagccaattttactaaatccaagtattgaaagttacttaattcctctgtcaaaatttaaatgatggcgaccattttggaggaaaaaaaaaaaagttaagctgccgatcggccaagctaatagctgcctggatcatgagtcgaggtaacatttcaaaggcaagtgtttttgtgtctgagggtgcctgtgacagacactgtaatcctcgtaaccagggaaagaatgacttcatccaaggatgaggaagaccacccagatactctggagcctgtgaggggagtcagtggttagggtgaggcccagcaggcagccctgtggcttctgttcccagcctttctgctgaataactttatggttcctgctgagcagtcatggttctggaacatctcctcagccccacctctgacactgttaccctggaacagcctcaaggcacaggagtggctcattctcctggcaggcctagggtgagttgaagagaagggctccacacccactcctgtgacagcccccctgcagagcctgggtttgggctgaaccccatcctaggctggcactccaggggttctcagagaggcacacccagaggcaacttaggaccagcattccaggtggccttacaccctctaacgctgggggatccagttccctctgcgcttctccaactggaacactgcagagggagcatcaccccttgctccaacacctgagcctgagatggagacacaaagcctttttgtttcttgcccctctcccgtcagtgtactgattgtctggagacagtgtggtgtagaggtgaagcatgtgggctctgggatcacactctcttgcttgaatcccagttctgccctgctctttgtgaccctgggtgaattattaagtatctctgtgcctcagtttcctcacctgtaaagtagaggatgatagtgtgcagttttggatcaatgtgagaggtaaccgagaaaacaaatgggagtgtccatacagtgactggcacataattaagtgctcagaaagtcccaatcatggtattgtgtcaacaagaaggttaaattaagtagagatgtggcacttttatctcaatacagggtgacactgttctttctctgtggcaaatcgctcacatacattctttctttctttcttttttatttttttaagacagaatctcactctcactcaggctggagtacagtggtgcaaacctagctcactgtagccttgacctcctgggctcaaaacgatcctgccgcctcagccgcaagtagtggagaccacagacgcatgtcaccccacccggctaattattttcatttttcatagatacgaggtctcactatgttgcccaggttggtctcaaactcctggcctcaagttaccctcccacctcagcctcccaaagtgctgggattacaagcacgagccatggtgcccggccacacatatactctaattaacattctttcctctcctgccttcgttgatatttttaccactttcatttactcttattcttcatggcttacatttcagccttgaggaatacatataatctaaattcagtggctcagctctgcctctgtgagttgtgaagaggacaaggtctgagaaggaatatctgatgccagatggtgggcctcttgtgtcctcaaggcaaaacctactctttgccggcacaaagaagtgagtagcattaataagcagaattaggatgaagtcagagaagccgtgaccatgggcgtggcatcctccagaggactgagagagcagggggcagcccggtcagtgagttgattaggaaccagctgatagagatcgagaaagacataagccaatattgggggtaacataagttggtggccatcagatattagccacaaaagacacagatattattggagagtagatggtgaagcgacagtagaacggtttattctgtggttttgatgagcccacattcttggtggttctttggaaagatgctgtcacatttatagtgacataatcacagggacagatgatgattgaagtgaatgaggtttccctggctccaagatttttttcaataaaggagaacaagatcctttctgatttgccaaattttataaaagttgtcagaattctctgaagtgtcctgcttcctaaggaaataaaaccagcttctggaagtcactgtgttctcaggcgtggtcgtgagtttctccgacatctgagcccatgagggaaaggcattgatcggcatggtggctttctggcttgcagatgatgaccactggatcgtcgacacggactacgacacgtatgccgtgcagtactcctgccgcctcctgaacctcgatggcacctgtgctgacagctactccttcgtgttttcccgggaccccaacggcctgcccccagaagcgcagaagattgtaaggcagcggcaggaggagctgtgcctggccaggcagtacagactgatcgtccacaacggtgagtcaggagcagggtgccttctggctcttcctgcagggcagtgggtttggactaaggggcccacgtgctagtgaaattcattttgtccgtaccccagagaaaacagggggtcttgggagcccctttctgaggccaaatcccgatcctgcttggccagatttttcactggccttctcatagggctcatgcaggtgtgggtaaaggcctttgtccagttcactggcactaacactgcagtgggctctcttttctttttattctgcttcctcgggccatttctgtggtcacccctggctacactgccccaaaaaaccattgtgactgaattaagattgtttgggattgagcagcccactaaagaggtgggcagttcatgtagccattgacgtaaaaactccacaggggcatcaatgtagtaagctccaaagagaatgatttcaacgcaccttcttttttctatatgaaaccaaatagccatgacattgactagctgggtttcctcagttgggggttttgagattctctggaacaaccataggatcttttaggagataatacccttgtctgatcctgattttaaagccaggaacattgtggaggaaagagctccatttagtttgagtggacactcactcattactatgggatactgggtttcaaaatccaaacagagtaatgctaaaatgtagagaaacaaaatgggccaggcatggtggctcacacctgaaatcccagcacttttggaggccaaggtgggctgatcacatgaggtcaggagttcaagactggcctggccaacatggcaaaaccccatctctactaaaaatacaaaaattagccaggcctggtggcatgcgcctgtaatcccagctgctcacgaggttgaggcaggagaattacttgagcccgggaagcggaggctgcagtgagttgagattgcaccactgcactccagcctgggcaacagagcaagattctgcctcaaaaaaaaaaataataataataataaacaaaatggagcatttctgttggtcacgaactgacccactacaccaaacagatgggaacttagaccaaaatcaaattgattttgaagcttcacccttcaaaattaaatgtagggccagcgaggattccaccacagcagggcaccttaggaagcagattatgcacattgtacagatgagaaaacagaggctgacaatgatgaagaaagttgccctaaatctttaataggtagctgagttggatgcaaacctagagttttgtgactctgaagtcccttgtgccacaccatctggtgacacatgacatgagacatagaaacactttataaaaccatcaccagtgtgtcccaggtcaggctgccttggctcccacttcctgaaagctgaggatggcccccgacactgtgaaatgcaataaggcagacttaagagaaatcaaaggaagccctgttcatccagcaagtcttattctctccacccccattacgtccagagaaaattcagtgggtttcagaaacagccttgaaggtgtttatgaattacagccacctgtatccgtaagggttgcgatctgctgtgatgcatttgaattaagaagcatttgaatgaagccagctccaaggccatcatgatgttcattatctatataaaaactgggtccactttctgtcgttaatggctttgttttgtattttccaggttactgcgatggcagatcagaaagaaaccttttgtagcaatatcaagaatctagtttcatctgagaacttctgattagctctcagtcttcagctctatttatcttaggagtttaatttgccctgctctccccatcttccctcagttcccataaaaccttcattacacctaaagatacacgtgggggtcagtgaatctgcttgcctttcctgaaagtttctggggcttaagattccagactctgattcattaaactatagtcacccgtgtcctgtgattttagttttcatttgtgtttatgtctgtgctgcagatggatgggtggggtgcgcctcttcataccaggagcccgtggctctttctgacctttggcctgttctagtgcctaatctccattattaaatactggcttctcccaacttcctgaaaaggaagtttcctctttaacttaggaaagccttacctaccagcctggccaaagcactggtgtcaaaagaggaagtgagtagacaggtcagtctagtgagcccaagtcctcagtcagccctaggcctgtgagggaggtgggcgggctggcagctcaccaatgctggatttgagaggctgagccacaggggacaaagtgagctctagaaaacactccttagccctttattgtctctagcatgcagctcacctctttcaggtataggcaaaatgttgatggggaggagggaggcctctggggaaattggaagatggggctctggaatctcgttctataggaaagatcagagcaccccctacctggaatgcagggaggggctgggtagggggtaagttgcaggggctgggacagaacaccagcatcctgcatcattagcagcacgtgggaaccctagtgtatgggtgcaaggccacttgcctcagttttccaggtgttcccaggggcctccatttctcatcttgaaaaaagcagcaaggctttggtaccagagggtcttggcataagtgcaaatctgcttcagatatatattagctgtggatttggggctggttacaaggcttatctgagcctcactcttttcttgggagataagggaaaatagtctttgcctgatgggctgcagtgaggattcaattaggcagtgtcccttagagctctgaggagctgtgaaaccggtgatgccaggctgatgtctatgaaatgcactgggagtgaggaaagggtcacacatctccgcctgggtgttggaatatccagggaccgtgggaggctcctgggtgccccaggctagtgttctccaccaaagacagaggagacaggtgatgtgcatgggagagctttgccttcctctctcacggaaccacaggctgtcagagccttgctccgcagcttcagtttgacaacctcagagaaccatagtgatataggagttaaaaagaaattactcgggcagatagtgagggtatggaagtccttggtaagattttccttttaatgaaaagcagcccctaaatccttttctaacaaaaagcagctgtaaaatcgtgctgcagacatagacaagcaagttggaagcttgcatgggtgaatgccagcagttgtgtccattggaatgtactacctaagactaagcatgttcaaaatggcggctccatcttctctttttgccagctatgagtgcagtaaggagaagacaagatggccaagtggaaagtccatttgcataatcagatttgggtggggtggccagcctttctcgtgcactacgtaaacgtcacacgtggtcaaaccaatctgtgagccctatgtaaatcagacaccacctcctcaagcctgcctataaaatatgctgtggtccaccacttttcccttttcagatgcctctgtctcacgagagagagagctgctctcctctctcctttcttctgcctattaaacattctgttccttaacccacccacatatgtccgtgtccttaatcctcttggcgcaagatgacaaaccctggttatttaccccagacagcaatgctgcttcaataagatagccacacatcacttccaaaaacaggtttaattgatcaaatctattaactaaagtgagcaaaacatctctgttcgtttgtcttcgagcttgtgatatccatgaatctgacttcagaagcaagctgatccagaaactgcataagcagtcactactgctggtgctgatttcctcagcaacaaagatttgttgaacacctactatacaccaggccctgtgctgctgtgcattgcagccactggcccagcctccaagtggtggagtgaccctgggttcggtctttggctctggtttctctctgtctctccaagggatgtattataaaaccataggcctataaacaccattcatatctccaaacaatgtgcatctccaggcccaagctccacatctctgcatccaactgcctattcaatttggaagtctcactgagatttcaaactgatgagctccaaatgaaactcttggctcccccacccctaatctttgcccaggctcccccatttttgttgcctgcttcaccatccaaccaatgacaggctaaaaaatcagagtattccccttgagttctccctttccctcacattctatcaattccatcctttccatcaataaatcatctttgttttaccttcccaaggtatatttacaagtcatttctcacaatccctccctaatgccactcacctccaaggtcccatccccatgtcacacttcagcagctgcccaactggtctccattttcattcatgctcctcagagtctattccctgcccagcagccagggtaatctttgcacacattcatcaggtcacgtcagcctccagttgcaaacctccaggggcttggagaacagaataaactcctaggccctatgtgatctaaccctgcaatttctctggcctcaactgacaggccccagccgggtacccctcgtctcagcattaaaggcagtgcctagtgcagaggaggctccatcaatagtcggcttatgccactctcccttcaagcatgtcagcctccttgcactaacatctcttctgtgtcccttccccctattcacacacgtggccctttcttgtcgcttaccttttgatccaatttgtcactcctcagaaagatcttcttaggcccctccccatctgatctaaattcccatcactaccatagcccccatcccattttcttcacagtgcttattcgctctgtgatgctatactatttattgatttgtagctaggcgtggcggctcatgcctgtaatcccagctacttgggaggctgaggtgggaggattgcttgagccaaggcatttgaggcttcagggagccgtgattgtgccattgcactccagcctgggcattggagcaagaccctcatctcaaatatataggtatctgtatatagatatagtttactgacttttatttagtttttctgcccctgacttgaaggtaagttccctgagagagggccatggctgtctggttcaccactgtattcctagcacaaaggacactgtctgccatggctggtgcttaagaggcatctctgctggatgcgtcaggagtaaaccactcctgaactccctctcaaacatttcagagtcatcctactttctctctgacttcatgatgccgattctcttaaaagggtccatggcatttttataaatgaaaaaaaaaaaaaaagtaagtcatctttaactgttccttagaaattcttcaattgctcttgacatcagtgaatgatcctaaacccttacgagtccaaggtagggcacagggtggctgtgacccttcagaggagaaatctgcgtcctgaatcggttctaagactcacttcagaaaccactatggtgtggctttatatgtaggagatgtgattgctgaacagtcataaataaatatttattaaattcgatcatattacaaacacactaaaaaagttcacatttaaaaggaacccataacaaatccttttttttttttttaagatggagtttcgctcttgttgccctggttggagtgcaatggcgcgatctcggctcactgcaacctctgcctcccaggttcaagagattctcctggttcagcctcccaagtagctaggattacaggtgcccaccaccactcccagctaatttttttttttttatttttagtagagacgggggtctcaccatgttggccaggttggtctcgaactcctgacctcaggtgatccacccacctcagcctcccaaactgctgggattacaggcatgaaccactgcacctggccaacaaatccttttataaagggaaaatattatgaaacgtggtgatcaccccttaatttaccgatgctgtggatgtctatttgcataggttcattttcttaaagcagggtgcactgatggagggtactggaaatgaactctgtttaaaagcatgccacagctcgccaggtgtgagaaactctgctataaagaaaaattagccagaaataatcgacaagtcatttcttttgacagatgtgtctgttaaaatggctcccttttctgggaaccagaagcagcaaaaaattttcttccactcattcctgcacagtgtcatgttgtagaggatggggtttagggctgaattagcaaatgtgaaggccaccacccagaagaagagggacggccagatgaccaggtcttgcttgaagttctggatcaggatgaggaggatggtgatgatgatggggctccacatgatgaagaaggagaccatgaggaggaagagggtgcggaagagccggaagtcctgctgggacacgcggatctggtggctctccgagtaggccaggcttaccgtgagcctcttccttgatgcctttgtgatctgtggaaaaccaaaacaggactggagccacaggtgactgagggttgttggggattttgagttaggggcccaagagttggaatctgctatccccaaggcactgaagctgtgtgcctctgggactttgtgtgcccaagcttaggatgtgctggagaaacgggaccccggttggactcctgagaaataaagcagaaaatcacctaccttgtaaacagagttatgaggggaagtgaaaagcctgaattgggtggtctacaagagggacatcttccctgttatttttttttaaagagatgtctctttaattgtttgcaagcacaatgtgcttagggttcaaactcaaacaatgctatactgatggggaacaaatgaagaacatctggccttctctaccctctatttccaccctgggaggtgactaacgtgagtattttcccatatggctttctggaaatgcaccactgccacacacaatattcctggcgtgggattgcaggcatctgctcttttgcctggtacacagatgggcccacaccacgcaccacactctgggccttgctcctttttcacctagcactatatcatggtgctcgggccatatctgcacagagaaggcacttcattcttgttatcttctataaatggtggttgcaatttatctagcccctattgaggagtattttatttctttggccttgtttggggaggtagcagctgaaatagcagtgtgcatactcttcccctctcttcctatattattccgttctcatgctgctataaggacatacccaagactggataatttataaagaaaagaggtttaattgactcatagttctgcggggctggggaggcctcaggaaacttacaatcatggcagaaggggaagaaaatgtttccttctccacatggtggcaggaaggagaagaatgagaaccaagcgaagggggagacccttataaaaccatcagatttcatgagaacttactattacgagagtagcctatgggaaaccatccccatgattcaattacctcccaccgggttcctcccgtgacattatgggaactacaattcaaaattatggggattatgggaactacaattcaagatgagatttgggtggggacacagccaaaccatatcactcccctacaggttgttgagtgggagatggcataccagtgtggcaggccaggcagaagggagcactggaccccaccctaggttcctttccttttgcaggagcgggagaaaatggatcctagtcttgcctacaggctcctgagtcaggggttaaggaaagatgatgtgatcagaggctgctcatttgctggggcagcttctgtcaggagccaacctgaaaatgaagctgagtgtgggaagggtctgcccatacctggtgggagtgggtgtgggaagggcccgcccatgggttggagtgggtgctgcttgggaatgatcccctcatcaacaggggctgttggcaccatcactagacacagggaaatcagaggcaatgaccaacagaagggggaaaccacttcatatgggcaatcatgcaagttccttgtccttgtgggagaccagaccactgccagggcagcccatcctccttctctgtcctcctcccagctccagcaccacaaacccacatcctacgccttgggcaggggaagctttgaactgactatgagattgacattgtaaaataaccaaaaaatgactggaaagctctgtaaatcagacataggtgtcattaaaggtgcccctgccccagcaagaaagaggagcttgtcagagcactgctggtgatatttgtggaaaatgaccgttttacatttatgtcccctgttgagaggtggcaactgggggaataagcctcctcatgcatatccttgcacacctaggtgagcatgtcagtagaataaattcctaccagtggagctgctgggacctctaatattttgtattaatgagcagagctggcagtgaagcagaggcatggcaggcaatgaaggcagccctggttatgtgggcttagaaggggattctggactcttctttcaggagatcctacaggtgtcccccaagactcctgaatctcaagagggggagtaatggaaggtaattaatatcattcacagttcaggtaaatttaactgcaagatcagaatggctgaaaatattcccgttagaatacttgtaactagtctgggcgcagtggctcatgcctggaatctcagcgctttgggaggccgaggcgggcagatcgcctgaggtcaggggttcgagacaaccctggcaacatggtgaaaccctgtctctactaaaaatacaaaaaactgagcagggtatggtggtgggcacctgtaatcccaactactcaggaggctgaggcatgagaatcacttgatcccaggaggtggaggttgcaatgagccgagattgcgccactgcactctagcctgggtgacacagtgaggccctgtctcaaaaaaaaaaaaaaaaaaaaaaaacttgtaactagctaattaaaggatagttgtttgttttatgattcaatgtggctgcttgctctgtgcaggagtttaggtccacctgttgatggtggagaccagggcaacagatgctgagtgaacagcctcatagtcatacagatctctagctttactgagggcttccatgtggccggcactgtgccgcacatttacttctcagtcgtcacatttaatcttcatacctactctagatttgtactatcattgttcccacttcccagatgaggaaattgaatttcaagaaatttaagaaacttgttgaaggtcactccactgataatacagggtcagagcccccatctctgaaaatctagctcagtgggattaaagatgagacaaattacaaaagtctcaaaagggatggccacactattcagctgtcccctcccctcaatggttctgcagggtgaaggttgctcaggatacacagggcaccacctcgggctcaaatgccagaggccatattggcacatccaagtctggaagtcactatgtagaatcaaatctagaacttgtgttccggtgaaacctggttaatctaaggaagctgccttggctgttagatctaggagaatatcagttgggcagggtgtcaggtgggtgggctgcagaggaattggtaccgcctctgagtaaggatatcgctttaggcctaagcacaggctgggggacccacaagggctgattctgacagcagcttcatccctcttgctgcccacaccatcctaagaagggcgacaatgtacccagggtccctggtgtagtgtcgcaaaaatactttttgatgagtgatgttgatgaaggctcacatttatggagcacctactatgtgccaggcccttacctatcacttagtttacctttttaaattctcccaacaattctgtgacatatgtactgtgatgatccccattttacagatgaggaagctgaggctcaaagagcttaaaaaacttgcccaccagtactcagctaagaagctgccgaggtggactgccaacttggcagcctgacgccagcccattgtctttatcataaactaattctttcccactctctactatctctgcccatgggaatccttctgcccaggctttaactccaaactctaatgccaggaactctgagaaggattcctggttcatctcccgcttggcatcttgcagcattttgtttcaggcactcatgcgacagttgccacatacactatgtggtagatgtccaggcgtccttctttttttttttttttttttgaggcggagtctcgctctgtcacccaggctgaagtgcagtggcaccatctcggctcactgcaagctccacctcctgggttcaccccattctcctgcctcagactcctgagtagctgggactacaggcgcccgccatcacgcccggctaatttttttttttttttttttttgtatttttagtagagacggggtttcaccgtgttagccaggatggtctcgaactcctgacctcgtgatccgcccaccttggcctcccaaagtgctaggattacagacttgagccactgcgcccggcccaggcgtccctcttacctctgacccggatatggtttggatctgtatccctaaccaaatctcatctcgaattgtaattcccataatcccaacgtgtggagggaggaaccaggtgggaggtgtttggatcatgggggcagtttcccccacgctgttcttgtgatagtgaatgagttctcatgagatctgatggttttataagacagttttccctcctcctgctcactctcttctctctcctgccaccatgcaaagaaggtccttgcttctccttctgccatgattgcaagtttcctgaggcctccccagccatgtggaactgagtcaactaaagctcttttctgtataaattgcccagtctcaggcagttctttaaggcagtgtgagaacagactaacacagacccccaccagactacgggttccttgggggatgggagctgaagcaaggcatgcctgtgtcttctgtgacccagagccctagcaggtacctgacaatggctgcgggtgacagacaaagtgggctcactcatggaccaagtgcttaagtggatggattttttttttttgagatggagtttcactcttgttgcccaggctggagtgtaatagtgtgatctcggctcaccgcaacctccacctcccaggtttaagcaattctcctgcctcagcctcctgagtagctgggattacaggcatgcaccaccacacctggctaattgtgtatttttagtagagatggggtttctccatgttggtcaggctggtcttgacctcccaacctcaggtgatccacctgcctcggcctcccaaagtactggaattacaggtgtgagccaccacacccggcctggatcttttttagcactgagagatgctactatctccttctctccacagttcccaccactggtagggtgtgaggaagaaaagcgggctttataatcaaatgtagctcctctcctcctcctctccccatgctagatgtcaaggatagttaacattgatccaggatttcaaatgtcttctgcactgggcagaatgcttgatgtgcttttagattaaactaaatgctcaattaacttttgaggattaatcctaatccacagaacaagcctctgggacaggttctgtggttgccgcagttttggaactaagaggccctgagaagagaagtgatttgcttgagcctcacagtcaagtaggggagtgtaccccatgccaggtgccagtgtcttctccggtgaggcacagcacctcagcagaggtggacagcatctggggaatgtggtccacggccaccgggtaaatgatgacatgcaaatgctggggggccctttcagacattcggattgtgtggggctgggtgaggcccagaaatctgcaagtttcctaaactccccgggtgattcttgcccactgaagtgtcgcagctgctcatctaggacaacaggctcagtctggagttcccctcagtcctttgaggacagacctttttgagactcactgcctccacacccacatgagcttctgaagaccgtggggtagtctccaccctacctcacacccttctgccaccccatgccagcagaccgctgctgccaacatgtggggatgggtagaggatgttcccactgacaaagttgggactcagccctgaaggttgagtctcctctgggagctgcttggtcaatcaacagcctcccttctagaatcactggacagaaaattccatctttccagagattccacctaccttcccacgaccagcatgcaggcccccaaagctggggaatgcaggtcaggcgtggagaaagggctttgtgttcaatgtctaacactctcatgttcagcggaaacagattttgtttctcagtttagccctgaggcaggctgagggttttccatctgcaagccatagactcacttattcgacaaatatttttataagcccctgctatgtgctaagcactcataggtgctggacacacagcaataagcaagggagctccacccacgctgctcttccattctggtgcatatgtgggcaatgagagggggatcaataaacatccactgttacaaaagggtagaggcatctcagttgtcacggcaacagttgctgggcgatgacgtcaagcaagccccaaacagtggtgacagcctgatccgaaggcacttagaagtcgctgggaggttattcccttgggaaaactgttgattggaaaaaatattgaagatgtatggcatgtttgagtcacaaggaaagaggaagcagggagggcagaaggatgaataaggccactgctccaagcacatgaagcagcccctgaagggtgggcagtagggaaagagccagggcgaagcctgctctgaattcttgcccaggtcagaaccaggaaggagggtggagactttagagcagggtttccaaaaaggcatttcttggagcacaagtgcagagagatgctctgtggagaaaagggggttctgtagtcacgtttagcaatgatacctattctattactgtgtgggagatcctcaaagtatattggcataataaaggtcctgagaagtcctgcagcaaagaatccaatctagcctatcccagcatttcccaaaccctttctaacacctaacattgccatggcactctacagagcattctaggagacacactgctttagagcaatagaagaccagggtgatgtgaaaaagagacacttctcaagcctggagatgagacctgggttacaggaactagtgacaggtgagaagtgggactggtggtgctgtagtgtttgtatcccatggtgtcaaacaatttgtgaattgtctgttattatgcctaattaacattgatgttcaattgattttacagagttatgtaaaaccaagcttcacagaaaaagcttggacagaaaagctgactcagtatctctgagttacgtatatcttcacaggggaggagatgcaaactgaggccctgcttgcacactccatccacctggtatagcttgtctgcttccaaattatcagcctgacaaactcatggtaccaagtgaggacaaatgtcatagtcctcctgggaaatgggcaacagtggattttgctaataacgtggaaagtaatttttaagtgatatttggattaaaattgtgatttttaaaacattatcatatctgctctttcattttattgtgttaatccactgaggcatatttggctcctgcagaaactgaggttcacattacttaagtgacttgcccaaggtcacacagtgataaagcctggattagaacttctgtcttaggactctttgtccagtgattttcccactgtccaagaagagacgaccctgtagacccctttcaatgtgatccaaggctcatgcctcattcattcaacaaatatttattgagcacctataatgaatgagccaggctctgatctaggcataggaatatagcagtgaacaaaccaaaacctctgctctcatggagcttgcattgtagtgggcaagacagatgactgtcataaattgaatatgacaggtgtagtaagtgtttgaagagaaataaatcaggataaggaattggagattgatgggaagactttttggtgaagagctttttgagtaaagactaaatgaagtggggaagtgacccatgcagaaatctggagaagagagatcaaggagaacaagtggcaggtgcaaaggccctggggcagcagtatggtggccagtgcgcagtacagcctcaaggccaacgtggacacaagggagggtgaaatatgaaggtgagaacggcagcagggccagaccacacagggccttaagttgagggtggtgatggaatgtaaattacatatttgctctgttactctgttactcagagtgcccttttacctcactgtgagtcacgacagctcttgcatccaggaggtgttccgaggtctgtaatggggagaagtgaaggctggctgtgggtttagacacaaggtgcttcgagagtaaactgctgtttagaggtgggtggctaaaaggacagctgccccaactcctcaggtctcatagaatttttccaggtggaccctggccttgagaaaaagatgggggtgggtggaaaatcattccttcctcagcaggcagctgagaagcgtgaggtacgagtgaaaaggggcagaccagagccctcttggcgcctaaggaactcaggagtgagacctccaggaaggaggtcaaatgctgccgccccttccagccagccctgctctagcgtcaattccttgttcttgatgtgctccaaatctgggctgttgtttatcctcttgcaaatcttagcagcaccttttcccagcatgctctgagacaggggtcggaagagcagccttgcctaacaaatcacgaccgtcataatttattcatcgcctgctacaggcaggcatggctctctctgtcccatcagtagcatctcctacatgcctcacaacaactctgtactgctggcattatgtttgctattttgcagatgaggaaactgaggcccagagatggtaactaagctggccaaggccacacagcaagtaagtggcagattcaagactcaaacccagattattaaaataacactgtcaagtctctgtgtctgtcttcatggccttttgtttttctcgtttttttttttttgagagggaatctcactttgttgcccaggctggagtgcagtggcacgatctcggcttactgcaacctcctcttcctgggttcaagtgattctcctgcctcagcctccacagtagctgggattacagacgcccaccactacgcccggctgatttttgtattattagtagagacgggctttcaccatgttggcgaggctggccttgaattcctgacctcaggtgatccactggtctcgccctcccaaagtgctaggattacaggcgtgagctaccacacctggcctgctcttctttcttataccccttattcgtcccttacgtttgtgtagcatttaacagtttgcaaagtgtttgcaaagtctcagtatcattccaccttgtgttcagtttctctcctttcgatatcagcacccttgtctgtctcctccctcttccccttttatgtcaaagcttcttctggatagagaatgtgtcttgcgcggtttttagcccacctcctttcccccaagcacttcgcacagagcaggcccttaacacatgtctgaggaattaatgcattgggactctagggtcagactgcctgaatttaaatcctgattgccacttacaagctgtgttaccttgggtaagttacttaacctccctgtgcctgggtttcttcatctgtaattcttatcagaattaaagagtcagttcctggcatatggtcaacactatgtaaatatttgttaaataagttctacatttatcttcctttttctctcacctctttccttttaacttaatgataatagctaacacttacatagcactatcatatgcctggtcccatcgcaagcactgtccagaccttaactccaggcctgaatctgcctcctgcacttgaacaagcctcaggctgggtgtcactttagtggtcattgggtgggcaagagtctaatgagtgacatggaggggccatctcccacaggatccagggattagcagacctggatggaggttggcctggctatgggttctgagcatctaagaaggttacagacccttagctgcaaagaaagggccataaaagtgaccagagagtgagcaggccctacagggcaccacttcaagtgcctacttgccagatgacccacacatgagatgctataaaaccaagattcaacaactataaacctccacgaggattcaagggctttgcattaaaccttctaaaatgggcataaacatggatgcacccatgctgtttgcctgggcaggcaacttactcacaaatgggctaccttacgagatataaaacaggctgactcgtcctttttatgtccctgtacatatttgttttaaaggtagagatcatttcctgtttcagtgcacatttgaaatggacattccctgggggtgggtggagtagcgactggaagataataggagggacttctggtaatattccatttcttgacctgggagctgctttcatgaatgcactcagtttgagcctacacctatgctcagtgtgctttttatatatgtatataatacttcaataaaatgttttaaaaagtatacattctccagtactgcagtgtttgcgatggggaaacaatggacacagcccaaaagaccataaaataaatgaagtcatatctgtagccactaaaaataatgagctagagatataggaatgatgtggaaagatgttaagatataatgttaagtgaaaaaagaagttacagagcagagagtattatctcatatctgaaaagaacattgaacagtgtcagataaccatttgaccattttaacctgcaatttcatatggttcatcaaatacacacacagtatacatgacatatacataagcttataagaaaaataacctgaaaaaatacatcttgaattgttaagaaggtagagtaagttttcagtttctgtgttatttacatttatgtgtctgctttcattttaatttaattttttgtaatgacctagtattactttagtgatgagcaaaaacataatcacaaagatataactttaaaaaaacccctctccttcctcagtgttgtagacctgggcagtgaatcaagattgagctggcgtgaactcttaggtgttctccgaccccagattctaagattctagcagaaataaccccaagcctgggtgaagttcagtggcagcacttgaagaaaacatacctgtaaaattttggagtaactgatcacaatgaccagtcctggcaccaagaagttcaaagtaacaaaagagacatcccacgagatctctccagcaatggtgggccaaatcagtgtgcaaatcgaaatttcctagttacaaaaaggaaaagaacatcatgtaaatgctggcttcttattggcctctggctcagtcttattgagggtttcctgacacttacacggttgcattgcccagttacacaactagcatgacagtgaaccccagaatccctcccactgcccaccacaatcccacttgcaaagtacttgcccttgaccctcagaatagccatgattatgttttctgttctccagggacagcaactgagcctcaggcttacagggtggtaagagctagagtcggttcctaggtgtggtctttccacttccctgggctgacatgcaaagggctttcgagccttctcttccaagcctgccattttacaaaggagaaaactgacccctgaaaggttacagagactggaaaggacatgctacataacaaacatatcaaaacaggaacgaggtttccctgtagtcacaactgtgtaagctgaaggacacagggtctttgctaaagcattaagtattcatgctgggggtgctcaggtgtctaaagtgtgtcgagctgcatcaacctggccatctagagccccaaggcaaagatcagcctccactcacagacagttcaagatgtaaaaccaatggaatatggcagaagaatgtgaaggtttgtgatcttgctgctatcactatgttgtattgattcaaatgtttaacactaactgcaagaactgcaacatatggagaccttactgactagttacaaatagcttccgcaacaatttcatccaatgaataaataggccaatgaaaacagacatatatctgtgtgtgtgtatatactaacttcccacatataaacttcctatgcccacttgactacagaaacaaaactgtttagaaaacaagtggccctaacacacgcatatagaatagattatttttaagagcacgtgctgtgtaaaaagaccacgttattgattttgaagggccaaggcatcttaaccaatgtctaggagtagcatgatcatctgaagtaccattcattcattcattcacttgaccaatattcattgaacgctctactaggcaaaagcagagaatttttagcagtgaatcaagactgggctggtgtgaacacatggtgggggaagttgattaaatccttccacattttggtgattggaaagaaacctgttttgttttgttttttttctttgagacagagtctcactttgttgccagtctggagtgcggtggcgcgatctcggctcactgcaacctccgcctcccaggttcaagcgattctcctgcctcgcctcagcctcccgagtagctgggaccacaggagcacgccaccataaccagctaattttttttttttttttgtatttttagtagagacggggtttcaccatgttagccagaatggtctcgatctcctgaccttgtgatccgcccgccttggcctcacaaagtgatgggattacaggcgtgagccaccatgcccggccagaaacctgtttctttcaaggatcttctgattactggcagtgaggctactactgctctctagaaaacccaccccacccccttttgtactcaggcctctgcccactatggacccctcattccaagacagcagtagcaatacatatgagcagatatgctgaagcatcaattggaagaaatggattccagccctgaatgtgacttggtctctcattcctattcttgtgatggaaaaattttaagggagagtaaaaaacagaggacacacagaagcttttcttaagacccccaactctttccaaaagccttttccagaatgtctgccaaaatctctccagggttagcaagacttttgtggagggtataatgatagagcaaggtgttctctctacagtaggagtgaaagaaaaaagcaggtccctaaaccatgtgcttgtatgatcccagtgtgttgaagagaatgtatatgtgtgaatgagtatatggccatccaacacacacatgcacacacacacactctctctcacatacactcacatgctcgcatgcacagaaaaaaacatggaaggatacaatccagaaagtgaagtgtctatttctaggcaggactctcaaattgtttttattcttgtggcttatctgaatttcctaattttccatgatgtgcctatattacttttataaaagaaaaaagttcatttataagtgaaatgatgatcaaacatgaaacacagaccaccatgatagttctgccaactttaccagctatttttcaacagaaacaatgaacctgtcccaggcagctcccaaattccgtgactttaataaagacgctcgttctccttttgatttgtggctcttgctcagggcaggaagtgtgataaggaagtaagataagaactctgcccggcacccccacacatgaactgagaggcagtgcaactggcttgggggcctgaatgatggattgacatgctctttagaaggttttgtatggtattgttgactaaatgcactgtctggtctcattaaaaaataaaataacaggtgccatgcccacagagatccaagttggtgtcataacttggtttctgtgggaaaatccatttggcttaagtcgttttgattctaggtattctcccgcaggctgtgacatgtagaggagttaggcagcatgtcaagtctggaaggtggggatgtgagtcctattatattctctgtactttttctgcacatgtgaaatgtcccctgattttaaaaagggaacttggaaaacaaaagtggcaggcctgccttgttactgagttacagaagcggaattggcagagtcaacaatagtcttctttaattcatttgctcaaccacccgactccagacgtggtggctgaccacagcgaagccacagtgaggaagagcaaggcactggccctttcctccaggagggagggaggcagagaagcgataggacacttcaggacaggacaagcagctggaagtgcccagagagcttcagaggaccagagagggtagagccacccagggggggttgtttctgctatgcctggaaggaccacggccagggtcacagggaggccggagctcagctgtcagaccagaattgtgggatgaaattgggaggccactcacagtgaagggataagtgtgacttggatcccccagatgtgttctgcctcatcccagtctccacttctccctggccatctcactcatttccacggctccttttgcaggtaaaactccaatctactcttttcagctccatgctttcctgaaccccagacttgcccaatagccatgaggacatctcagcaggaggcctcataggcactttaagctttgaaggtcccatcctcaaatggttccacctgattcctgcactccctgaatcagggcacagggccaccattctccaagctgccagaaacctgagcactggccttctgcccacctcctcctccccactcagaagggatctctaagttcctccttcatagccattgacttatccacctattgcattttcactggcctacccccaacccttaccaagaccaggccatcaccattaagtctaaacttcctaccaggatgactctggtctttctccctctcctctgccaacgcttccagcaccatcttttgcccccactgaacctcaggctctacacatgtgtggtggagaactccttgcaagtttcagaacagcactcactgctcctttggcctccatgtggactctcctctgcctacaatgtcctcctcgtctccatccccttgcctggtttacttcctctcatcttcacactcagtggggacactgccatctcccagtagcttcctggactccccacacccagcagaaacccttccgcagctctccacagcttgtgccatcatccccttccctgtctggagtccccactgaagtgtgttactaagggtggggaccaagcctgcctttttccagccagcatcccagcacctagaattctgcctaatacacattaggtgctcaggacaaaattgccaaacgacattttctaaggagactccccttgaggatggggacatctgtccacaggcactgcggaaatgctgaccctccccacactgcctgacttatttgcaaacactgcctgtttgcaaataagttctagctgtttgttccagctgtttgcctatcagtctctctgatgattcttcgtgctgtacctctggagacccttggtaaatccttgttcctgtgtctcacctctgccatcaacatggaagacttcaagattattttaagaacctaggagtgctagttggatatttcatcttctatcagcttcccagcaaaaaagagagaaaatattaatgcaagagatgcttcctttcttatatttcaaaagtattctctaatcataacaaaagcaagcaaactgtgtttgtttcctcagacaatccacactcagcagagacacatgaacattcacatgactagcctggtattaaattagggtagggtggggcagtgggatcaagtgccgcaaggaagtgtaaacccaagggtgacggtatccagagggacccaaaagagtggggctaaattctggttccatctcttgccattctgtgaccttagggatttcctcttttagaataaacaaaagaatatggggtggggtgattgtgaggaccaaattaggccagaatctaggaccatctgtgtgcttctccttgaagagaaggaggtggatttacgtgattttgtggcaggggcaagaggggaagggtgcttagtaaatgtttgcagaatgaatgggcagcacattctggccaggatagacagtcttctccacctgccgatatgggtcactgcccagccaggtccacagcacacacaggctggaatcctgttgaagcagggtgagctgacctggctgagatgtcagcgttgctaggatgagttcgccctcttaaaatggcagtctgttattttacagcagtcagaagaattatactgtttgaagaatgtttaaaatgtctatgttcaaagataaggaaagtaataatagctagcaattcttatgtgcttaactgtctatgtgccaggtgttggcccatttactgaacatgagtgcccatgatgatccggtaaggctggttgatactgtaatcatgcccattttgcagaagaggaaagtgaggtattgagaggttagacagcttggattctgtcatgaagctcccgaatggcagagatgggatttaaacagaatgtttgactccaaagcccactccaaataccaagttgtctcgcatttctaggatatttatcacctcatcttctcttcagtgaagttttagagtctgattaccatgaactactgggcacccacagcccacgtggacaagagattgagtttctgtttcaggagggctcttgggtcggcagaagctctaaggggcagtttccttggccagcgctccttgaggggagggagccagtatctgcttaggcttggttgattctctcagcgtgtggtttgggttaggaaaatatcccccatcccaaacctccatatttagtctctaagtgggatggggcagacagaatccacaagcagaaagctgggaatatggggattgagaaaacaaccctttgctaattttaaatgtgagactcagtcagtctagaccagatcctcctgttgcttttttttttttaatgactacactccccttttgtttttttctgtctctcattcttttcaacttatttcttcaactgctgaacctataatattggatgttttctatgtgttcaggcaacaacccttaggaaattgggttttttctgtttgttgggttcctgggcaggtaggtgtgaaagtgtgtgtgtgtgtgtgtgtgtgtgtgtgtgagagagagagagagagagagagagagatgaggtggatgtggcagacaggtaggaaagaagacaaagaagatggagagccagaaaggattgtcccattttttttaattaaaaaaaaatttttttttttttgagattgagtcttgctttgctggccaggctggagtgcagtggtaccatctcagctcactgcaacctccacctcctgggttcaagcaattctcctgcctcaacctcccttatagctgggactacaggtgcatgccgccacacccagctaatttttgtatttttagtagagatggggtttcaccacgttggccaggcttgtctccaattcctgacctcaagtgatccgcccgcctcagcctcccaaagtgctgggattacaggtgtgagccaccatgcccagggattttttttttttaatttcaagctttcccacctcacctctactaatttcagtgagtagggctcctgtgggtaactaactcacctggcccccagtgcacactgcagcctcattctctcccagtggctttgcccaaatccctctccaaagctgcttaaaactaaggaagtgtttcaacattaaaacaagggaggtctgtgtgcccagccatcacaacacagacctccacggaagcaccttacagcacaactgtggccactctggaagcaccacagagggctctaaccacacccagattctctaacagtggtgcggtactaagtggccaagacatggaaggcccctgcctatgccaaggccttctcacccaaacagtcacctgtgtccctgtcagcacacaattttagtctgggctctggctgggaagtgacaagagtcttattttttaatgtcatttgccaattaattagggttatacgtgaaatcactgaaaaaagggagaggcacaaaatacacatctgaaaacttaagataccttcaagatacattctatctggtctttcattccctgaacatcattttcttctgtaagaaagaaaatgaggtgaaatacctcaagttctgtgagaaatatagaagtactgtgactcactgagagaataactttttaaaaaatcaaagaaactgatggcagaagcccagccccctcctgatccatgcttttagaggcatctgcgtggcccaccttgattctcaggtgtgtgtgggctaagaacaagcctgctcactaagccagagcccttggtctgcccataaatggcacccaccagctcagctaatcctggcttctctgggccccacttgagtggacatggccacaagcttgcatgttatttgatcaagtgccacaggcttgatggggctcctgcctattagtcattcaagctcataaacaaacaaacaaacaccccacaatgtattccacacaagcattagaaacaagtgtttaagtttgatttatgtttaaaaaaaaaaatctcgcacaggatacaggaggcagactccatccatcctacccccaataaaagggctgtgtgagagactggtctgggaaaacccccagagaagctccacctctctgtcccaggctctggaggttcacacagtcagggggtgtccctggtggactgtgtgcatctccataaccaagccttccgctggtgacatgtcatttctcccaccctactcccctctctgaccacttcgaaggtccctctttgggaccgtgattcctgtttgtgccacgattactcagggcgccccatactcactcctaggtggagagggagcttaagggtagggggttccaggccggaaaaccagtgaccccggcagggaaggggaggccaagaacccagccacgggcagaagctcctggaggctgagcccccagcgcagagacctaagtcctttctctatctctctccgcgaggcatggagaaccaaacacactgggaagacagccagacggcggccactgtcctccaccgtgactccgcgtctagattccctcttccgtgtggatcccggcgcacgaaccctgcaaccacggggcacagcggcaagagaaaaagacccgagctcgggattccggaccgcgggacttgaggggaacagagccaatgtcctgctatccgcagaaccttattccgatcatggtcactcccacccctatgagctaataatgacaactattgacccgctatgtaaaacagagctcgtcggcccagcctctgtaatctgcacatttcaggcgcccaggacacctcgaaggtctagtgtaatcctcccgttttgcagctgaaaaaactgaagaccccggaagggaattccgtcacaagtcccctaaagacagcattgcatctggggtccccgggtctcacatgcctgtccgcgcgctttcaacgcaggaccataacccaaccctggacaggagcccaactcctccttgaattacgggtaaacttctggaaggagcccatctcctcctcgaattacggataaaatactctgggcaagttattatacacttcggtgtgcctctggttctcatctgtgaaatgggtgtgataataacagtattgtagcacctggcgaggaatcatgattcaatacaaagtgtttggccaccctgcacccccaaagttccgtctcgctcctaaactactcgttaattaacctcgcaacagtcattgcattttgcaagaatttgggggactccacttacatcatttaggagggcgtgtgcacagcgttgtagtgagatttaagagattaaacttcacagccatgggcacaaggtttggcacaacgattaagtgcaataaatggcaattgttcttgatcatcctcatcccagcttccgtcggggccctgcttcccagcctgcgcaggacacctgcccggcacgcacagaggggcgctcacctggtcggcgccggggagccgttgcgggacgactcggaagaagacgcagagaggcagagcggcgactgccgaatagccccagatgagcgccagcagcactgcccgcgcccgccgcccaggaccccgcacgccgcgctgcaggtgcacgatgcacaccatgcgctccaggctgaccgcggccagcgtgaggatggtgacgctgccgctcagggtcatcacgtagaagagcaggtggcaggcaacggggcccagcagccaggcctcagtccagcgcacggccagcaccagagggatagcgctgatgaagagcaggtccgcgcagaagaggttgagtaccaggcaggcagtcgcgccgcggcgtcgtcggcgcgccaccagcaccagggcgcacacgttgcccagcagcgacactgcaaagatgagcaccagcacggttgtctccactgcggccagcaccagccggtggtcgcccttgacgtcggagaagaagggaaagcgggtgcggttggcttgctccaggctgcgcaagggcgcgtcgcccgctgcccgcgcgcattcaggggacattcccggcgcctggcggcccgcagcggtctgagagagtgctcatctgggaggcgagtgagtgccaaggcggggaaagagggagggaggcggttgcgacatctcgcctctggccccctcccttctgaggagcgccagcactgggtgcagggagctgcacccggggcgcgcgggaaccaggaagtgcccggcaacactggccgcgaacaccgcagctggccggggaggtggcggccaaggcggaagcctcgcgccctctggccgtttgaaagtgtatccagaagccagaaaactcacttagcgaattcctcgagcccccgcagggcctgcccaacctcctttatttttcagggacactggatgtgcgaagccttttgtgaacggatttagctaaaactgatttaaaagggtcagagctggcctttggagattattttggcctgtgtcgttcaggctttactaaagaaactccatgggtctggaggtagatcctaaaacaacttgtaatgagtccatattttttgtgggggagagagggagtggagatcttttatcactacttaataacaggtctttaggtggattatctactccctctaccccagatttttaatctataaaatgggaataataataccccattaggttattgtgaggctcacctagagttttgcacacttggcacacagtaattactcgttaaatgttatcaaatattagttattgtaactaaaatgcatatacattttgcattctgaacgacataaaatgctttcttataaaaagggtgagtccttccaaattttttaataaacttgccatcccaggaagacagatatttcaaggctggcagattcacacacaagctatgaatgtgccccaggtgccacagtttgaggagcactgggcaatccagtcccgttagagataaggaaactgaggcccagccagagtgacttgtctaagctgtcctctggttagtaatgaaagccagtcacctgtccccgtcccacacatttccatcacaccactgcagtctcgttttctgtaaatggggaagctggagatggaaaagtatgcctgtggcctaagatccagtggccacttccccaaccagccaccctcctgccacccacaccttcaccccctcttccctctgccatattaccaggcctctcccagttgcccactctgtcttctaattgtctttcttaaggttgggtcttaagaaatctaagtactgactgggcacagtggctcatgcctgtaatctcagcactttgggaggccaaggcgggtggatcacttgaggttgggagctccagaccagccatggccaacatggtgaaaccccgtctctactaaaaatacaaaaattagctgggcatggtggcaggtacctgtaatcccagctacttggaaggctgaggcaggagaattgcttgaaaccgggaggtggaggttgcagtgagccgagatcaggccactgcgctccatcctgggccacacagcgagacaccatcttaaaagaaaagaaagaaagaaagaaagaaatctaagtacttcaggctggttgcgccagagtctgaagtactgtctggggagggggtccatttgtgtgtctgcttttcatggtatcaaacaggtctgagctgatgatgtgacttctaacctgagaagtagatgctcagcttgaacattgactaggttcaagttgaaaaacagaactggtttgcttcctgaaacagttgaaaaagggcaaaaaattgaaataaagggaactcagacaaatggggttttggcaactgtctgattagggtcaggggatattagtgtttgtgtgagggaaaggaaactatatgtatatgtatgtgtgtgtgtgtgtgagagagagagacagagagagatagtaagagggaaaagcacagacagagacagagagagattgattacatcacaggctgatgtgatgatatagacacagagaggtttccctagaatgtacaaccagggtgggctctttgcactaaaaggccttctccaacattaacctcctgggttctaccaatggcaaaatgttgagtgcagaggctcataaactttctccattcactgcaccttcatggcacccctaggcaaaaagaaaaaccaaacagaaacgtttcatttattaagtagttgggtccaaacaacttaataagactttatgtcctaacaacttagtaactatcttggaaaataataatacctataaattggggtaaaaattttagtgtttcttttttttttttaatttttgagagggagtctcactctgtcgcccatgctggagtgcagtggtgccatctcagctcactgcaacctccgcctcctgggttcaagcgattctcctgcctcagcctcccgagtagctgagattacaggcacccaccaccacacccagctaatttttgtaatttagtacagatggggtttcaccatgttggtcaggctggtctcaaactcctgacctcaaatgatccacccacctcagcctcccaaactgctgggattacactcacccggcctgttgtttcattcttaaataaccacagtgaggccaagtgcaatggctcacccctgtaatcccagcactttgggaggctgaggctggaggatcacttgatcccaggagttcaaaactagcctggtcaacataaccagatcctatctctacaaaaaaaaaaaaaaaaaaatagctgggcatgggggcttgtacctatatagtcccagcttcctggaaggctaaagtgggaggatggcttgagcctgagaggtcgaggctacagtgagctatggtcattatactccaatgtgggcaacaaaggaagaccctgtctcaaaaaatttttttaaaaaaccaacaacaatagcttcctgatgggctgggtgcacttgttgtactctgcacagtttttcaaaacaaaatcatattgagcactgctccatgttgattttcatgcagtccctgctttttatcacagcaactcctaaacactcagctttgtaaggtacaatgtcatgagtctaatgctggaactatgaattacctagtagagctagcagttcatgcagagccggatgggtgttgagtagtgccatttccctgcagtacccgagcccacgtgggcactagcctttggggaccagagccctggcaggacaactcactgtgtgaccttgggcaagttactgtagcttcttagagtttcagtcttcccatatatgaaaggggatagtgatagtactgacctcgtagggtttggggaagattaaatgaagttcctttatgtaaagcatttcgcacagtggtcactgagtggacactgtgggtcagactctgtggtcaacactgtatatggattatggacacaactctgcttgctgacagtcccagttatgatattattattattattattattattggagacaaggtcccactctgtcacccaagttgggtacagtggcatgggcatagctcactgcagtcttgaagtcctgggcccaagtgatcctcctgcctcagcctcatgagtagctgggactacaggtgcataccaccatgcccagataattttttttattttttgtgaggtgaggtctcgctatgttgcccagacaggtattgaactcttggtctcaagcaatcctcccaccttggcctcccaaagtgctgtgattataggtatgagccaccatggccagcaccagtttatgaaattattattagaacctttttcatcctcaaattgccctggtttggaggataaagtatatggccatccttcctttgtgtttgttaactcattcaattcccctacaagttgcaaacattgggatttgaaccgagacagtctgactccggagtctttgctctgaaccgctagagcagtgcatcttaactgggggagattttgctgcaacccccaccctgggacattttgtcatgtctggagccatttttggttgtcacaactgggagattgctactgacatccagtgtgtagaggccagggacgctgctgctaacatcctacaatgcacaggacattccccacaacaaagaattgtccagcccaaaatgttgatagtactgaggctgagaaatcctgtgctcttgagacctcacaagactttacttcttatttttaaccctgtcatggggtcacgtctagtggcaaaagccaaaaatgttaccattttttctcagagaggtttcactacaacctctgtgacccctttaaccaacccactgggctccgctttgtgtttgggccccagatgtgcacagctgtgaaatccctttcatacacagggctgggtgtggcatcctcagggtagacagacttcacatattccttggagactggacagtagatacccatcggctgatccatcactgtgaaagtcatatttattgcccatggtattggttctttacctcttccactctcagataaagccatagaaactgagacaaggatttaccaagcgtaaatctggacagtctcgtttctaagctaaagagaaagccaacattgcaggtggcttctgtacctctttacatttccaaccaaacaggaggggagaggggcacaggggactttctctgtgtatgcttttcttttcttttctttctctccctccctccctccttctctctctctttctccctttctttctttctttctttctttattctctttcttctctttctctctctctctctttctttctttcacttttttttgagacagagtctctctctgttgcccaggctggaatgcagtggcgtgaccttggccccctgcaacccctgcctcccagattgaagtggttctcctgcctcagcctcctgcgtagctgggttcgagacccatctttttagtagagatggggttttgccatgttgaccaggctggtctctaactcctgacctcaagtgatccacttgccttagcctcccaaactgctaggattacaggtgtgagccggttttcttattttttctctggaaaaatgttataaagttagtatgaaaatgcttactggttcattacttgacctccaaatctctctgtgagagtctgtccatctgtctgtgtatgtatgtatctgtctgtctgtctgtctatacctatcagttctgagacatatgcctttgcaggttcagggtatctccgtgcaaaattaggatatattatagagcagaatgcaaaggttgctcaccctcgtgcaaagatttcaagtctctctcctgcctctgttcctcccatcctgtcaaggtgagaccccttccagatccccagacccaactgccctgagcattcatagctgagtaaccacctcagccaggccagagtggggtgacggggaagatcaccttgcaccctgatggtggtgcaaggctccttcttcaaggaggcccaagagttcccagggagacagggaataggcattcagaccaagggaacagcaatgcaaaggtaggaaggcccgagagagcaacacatgcctgggaaggggcaagtgctctggcatgcccagcactgtgatcttctccactgtccatagcacacctatccaccaaaaggaaggaacccaagtagaagctggaaaataagagcaagactcaagtgagcagctgcctgttgataagttgttcacacactaggggcccagggcagggatcatactgtgtctactttaaacaagatacagaggccgggccacagctagcacactcaaagctttacataagttagaaaaaaagggacttccctgaacagatgagttggaaggcgctccttccccagggttgatgcagccaacgctctgggcctgctggggctgagcccctgtgcacgcccctcaggtgggagtccttggcaggccgaaacctgcaatgtggttagaagtggctgtgcctcgtggtttgtgggcttgagggcagcaatggcccttctcacgggctcttcctgcccacttgattgcggtttctgctcaagccctcaaagcccacctcataccttaaactgcctttgtaagattataactgaggaaattatgacagtgaaagaaatcagacctaactgactccatcttgcttctaaactttaagcaagctgtccttgttcattcctgggcgtaggccgaactaactatgggaaggaattcagttcatgatttgactctgaaacaaaattgatagcagcccttttcccgaaaagaccctcgtcttgcctggggactagtctgcctttgcaggactaacaaattagctacaagattagaaattacagttcagatgtcatgctggctccaagagtctgaacctccccaaattgctcctggggtaacatcactgttgcaaaacctaagatcagggcttgagatattttgcagaccctgcactcgatggatcagccaccaccacccagaccggtaatctggttcaaccagttctgccatcacacccaggaatagaaaacagcaagaaaaactcactttgaccctctatgattctatctccaacctgaccaatcagccctccccatttcccaagcccctacccaccaaattatctttaaaagttataatgcacaaatgctcgcagagactgatttgagtaataaaaaaactgcagtctcctgcacagccggctctgaataaattactctttctctgttgcaattcccctgtcttgataaatcagctctatctaggcagcgggcaaggtgaacccactggacagttacataccctatcacagcgggggcattgaccgggcagggcccatctgtgagttccactgagccgactttgtctgcctgggagtttcctcaagctcatttctgcggcaatcttgcctgaggagatgaagaaaggagagcaagggccagccttttagcaactgtgagggcggggatgtccgcacactggacggccaggcctaaccactgttgctggagtcctggggtgactaaactctgttcctcccaggcagacagaagaggtgaagccatgcctcaagaagccccagtgccttgaggaggccttaggagtcaatagtccagaaaagatcagccccccactgctgaggtaagtggggaagaaggaacactgaggagtagggggactggcaagagggggtagaaagaacaataacaataataataggagtggctgggtgcggtggctcacacctgtaatcctggcactttgggaggctgaggtgggcagatcacgaagtcaggagttcgagaccagcctggccaacatagtgaaaccccatctctactaaaagtataaaaattacatgggtgtggtggcacaagcctgtagtcccagctacttgggacactaaggcaggagaattgcttgaacccgggaggcagaggttgcagtgagctgagatcgcaccactgcactccagcctgggtaacagagcaagactccatctcaaaaaaaaaaaaaaaaaattagtagtagtggccaggcactgtggctcacgcctgtaatcccagcactttgggaggccaaggtaggtggatcacgaggccaagagatcaagaccatcctagccaacatgatgaaaccccatctctacttaaaatataaaaattagctgggcatggtggcgcacgcctgtagtcccagctactggggaggctgaggcaggagaatcacttgaatccaggaggcagaggttgcagtgagccaagatcgtgccactgcactccagcctgggcaacagagcaagactttgttgcaaataaataaataaataaataaatattagtaagacaagtgagttctgtttgggggctaaagctcaggggctcgagcagtggtccctgcaactcagcgctctcagccctgcctgttttatcacctcggctctgcagccttcctgtccacagtggtagctaccaggatctttcccagtgcatttctttccagcttaaattggccagaatttattaactcctgttgcttgtcaccaaggagtctaatcaatagaagatccaacatctgacgcctcccctccccccatgttttaaagacagtctttattttaatgaggccagattgcccaatacgggagctcaaactggataagtgggatcttggtaatcacctttttcccattcttccaaggaaagatgtaattaaagcccctaaatacaaaatgttcaactcagagagaagagcaattttgatatggtccatttctacttaagcggtagtgtttctctgtggccctctctcggccaggagccacagtggccagccgaggatggcaggcagtccattgagcacacactgatggagcacgtactgcatggccagcaccacacccagtcctagaaatggccagacagcaggtaaggatgtgagcacaagcccagaagagctttctacagtacaagatgtagctttaccgaaattccgcacatcccaaggagaccattggccaagatattgcagtgttgcgcgattcctcttgcatcactttctttttttcttttctctttttttcttttttttttttttggcttctttattagttctatgtttctattatgaaatgcaagaaaaatataaatttgtccttcattcttccacacagcgataatcctgtgagattgtgctgtgtaactttccagtgtgttttctgtacatccggggctgtctgtatgcctacaggtattttataaaatgggaattgtgttgcacacactattttgtaatatgcatttaaaaaatgttttcaggacctggcgcagtggctcacacctgtaatcccagcactttgggagactgaggtgggtggatcacctgaggtcaggaattcaagaacagtctgaccaccatggcgaaaccccgtctctactataaatacaaaaattagctgggcatagtggcgcgtgcctgtagtcccagctactcaggagactgaggcaggagaatcgcttgaacccgggaggtgaaggttgcagtgagctgagatcgcaccactgcactccagcctgggtgacagagtgagactctgtctcaaagaaaaaaaaaatttttgttcagtcacattattcttctattctatccctcagtttcctcaatgcacacaactgtcccgtgccatatttagcccccagcttggctgcaaggtgaaaggacagagctatgcaccacacccaccctccagcaatggctctcagaggccagcctctgctttagtctccgctggtttaaagtgaaatgggaaaagtgtcaactgtgtagttttccccaaggctaaccacatccatttttacttgcaagattatgtcctgcttattttgctgttgttgttaaacttctctttcttttaggacagagtatgtgtggcagtcattaaaaacaaacaaacaaaacaaaacaaaaaatcctatgttaaaaacttgactactggccgggcgcggtggctcacgcctgtaatcccagcactttgggaggccgaggcgggcggatcacaaggtcaggagatcgagaccatcctggctaacacggtgaaaccccgtctctactaaaaatacaaaaaattagccgggcgtggtagcgggcgcctgtagtcccagctactcgggaggctgaggcaggagaatggcgtgaacccgggaggcggagcttgcagtgagccgagatcgcgccactgcactccagcctgggcgactgagcgagactccgtctcaaaaaaaaaaaaaaaaacaaaaaaaaaacttgactactgcttcaatctccagagaaactcagtcaagactcaccagcccgtcacatggcgataataaggacacatattcatacaagcaaagacctccaaatttccagacccttttatgtccatgctcttatctcatctcgaggacagctctccagggcaggtggtatgttctcgcgtttcacagaggaggcagcaggtggcccccgtgcagcaaagggagatggtcccgcttacatggctcgttagccccagtggagcagactcatgttctcgattctcaactcagtgaccttggaggggctcttccctgagctgcagctttgcaaccatgcatcactgaagaatggaacctgatggaacattctggaattccactccggaagtcccaaagctacaacacacttcagtggccagaacctggcctctgccactcctgctcacccattggcccttgcttggggctgcatgcttcagcactctggcgctgcctgtggggtgcagctgaaggggaagagcaagcctcacaattgaacacttgcaggaaatgtctgatacttgggtgtggcctcctgggtttgattcctgtcctgtagctcactggctgtgcactcttgggcaagtgacatcacttctctagatctctgtttcttcatttgtaaaacgaaaataacaatgcatccttcaaggctgggcacggtggctcacgcctgtaatcccagcactttgggaggctgaggcaggtggatcactcaaggtcaggagttcgagaccagcctggtcaccatggcaaaaattagctgggcgtggtggtgggcacctgtaatcccagctactcgggagtatgaggcagggagaatagcttgaacccaggaggcagaggttgcagtgagccgagatgacaccactgcactccagcctgggcgacagagcgagactctgtctcaaaaaaaaagaaagaaagaaagaaagaaaatattaaacactgaaacactgaaccacttctaaaatagatataaggtcaacagtaagggggaggtaaatcagttatatgtcttcattagaatattacacagtcattaaaatgcttgtgaattgaatgatatgggtggcaggtacctgtaatcccagctactcaggaggctgaggcaggagaatcgcttgaacccaggagatggaggttgcagtgagctgagattgtgccactgcacttcagcctgggtgacagagcaagactccgtctcaaaaaaataaaaataaataaataaataaaatacttccttcattggcttgtgtaagataatatactaaatgtcacatctttagtgtagtaagggcttaataagtgtaagtttgtgacttttttttagcatctgacgcatagtaggggcttaaaatattttcaatagttgaataattaaatagatgaatgaacgaaaatggaaatttgaggtttagtgagcctcttgatgtctctgctatctaagttgtggtcctcaggagcctgctgtaaagatggataaggatgggggtgggggtgggaggggccatcaccaccctggtactccgccactccacccccactgcccccaaagaaacaggcagtggaaattaaaaagcagggctaaaggggatgtaacacagaagtaaattttgagaagagagggatcatttattgtaagatgtgttctcagcgtggggtccttcctttcctgggaaatatgacctccaggtgatctggattccaaaaggagagaaaagacatggctagggaaggggtgtccagtgagggccctaacatgcagcccttcggaggggcgaagacaatgactcagcctggccaacgccctgaactctgactgtctgtttcctctatgctgattgagttcagcagccggcaacggatgagactcctaggaagggctccagaatcactgatagctgacggaggcttggcagcatgggggccctccgagcctgggaaggtgggcttatgtaaatactgtaatgcagagggtgctggagccgcatcaagagccagctcagctgctgtgcgctactgacacagccattcctgtcttgggcctcaacaacttcctcacaaatgaaaatgttgaacaaaatgagctctccaagccctgccagccaggtctgatggaagagtgtagggagttaggccttgaaaagctgctccgcactgccccctggtgtcattggctacggtgaccattgtcctcaaacctctggtgtccatccacccaccccctcatccacctatacgcccatccatccgtccatccatccatgagcctggtacatctctgaagagtgtgtcagcttttcatttcgggggtaaggggagaaagggacctgggcccacatatgggggcaatgctgacctgaacaagcagagccacaaggagaaggggtgaccagacggtacctggagcttggaactgttgtctggactcagaggtattgagtgacacccaaatgagggaactgggctccctgctcctggtggcagcttgaatgatggttctttggatttttaaggatgaaaccatcctggaaagtggaccttgagatatagatcatttgtctatttcatacatacacacacacacacacccaatatagcaatgctattgtggggatatatatcagacttgatggctgtccttttgaactctatcaggtgacttgcaaatttcccacagtatgagtcctgcctccccaagggaaaggtcaacactggctttcccatctcccttgcaccaaggcatgtaccctaagcttagaccaccagacataccgtgagagacttggctttgcaggagaggacaagctagggtttcacagaatccatttatgggcaagagtttagggcacaatcaagaggcttctaggatctcacatccagaaccagtggtgcaagccaggcatggtgtctgtgctgtagtgtggtgacactgagtgttccactagagcagccttcatcatgtgacatcgttccaggctgggaagtcttcacggtcaattctctggccctcccatcggagaggctgtgaattacattatacctttttctgtttaatccagccagaatgggtgtgtgtgtgtgtgtgtgtgtgtgtgtgtgtgtaactgttgctcctcctgtgctaatgttttgttcagcctcagaggcctctggcctggcttcattagactcctgactccccagacaaataaccagacttagctgagcagcttccgaatggcaagccccatgtcctctctttctacaacccatgcaggaaggaggctctaaggcctggataactttctcccagtttacttttcctctccccaaactgcattgcaaaaccagccatttctgtccagccaaccacttcatctcccctttctcctcctctctcgcaattcctgtgaaacacacacatacacacacacacacacacacacacgagcaagagagtgagagaaagagagaaagacagaggcgtgaggtgaggtcagtgactcctaggccataaattctggaataatgactccctggtgaactgactgacacagtgctttctcttttctcataatttgcattataggaatctattcctcatattttgatgcatggagaaatctctttcttttttgggggggagggggaaataaaactttcttttttctttctttctttctttttttttttttttgagacagtctcgctctgtggcccaggctggaatgcaatggtgcaatcttggctcacttcaacctccacctctcaggttcaagcgattctcctgcctcagcctcctgagtagctgggattataggcgtgtgccaccatgcctggctaattttttgtatttttagtagagatggggtttcaccacgttgaccaggctggtcttgaactcctgacctcagatgatccacctgcctcagcctcccaaattgctgagattacaggtgtgagccaccgcccccagcagggagataaaattctctgaattcagctttttccaactccttaataggtaacatttactgacctctcactatgtaacaagcatcttacttgtggtgactcagctaagtctcacaacaatcctgtgcagaagatgaacattgttattattatcatccccattttacaggtgagaagactgaggcagaagaatacaatgatcgggagacgttgggttacaactaacaggaatccaactcaaataaaacaaacagaaatggaggaggagaagaaaggagagaaggaggataaaagggaggaggaggaaaagaaaaagaaagaaaaaaagaaatgcactggcctggataagcaaaaagtccaggcagtgactctagctttaggcacatctggatccagggatgcaaacaacaacaacttatttgggcacctgtcctcacctctgactcttttctctggattgggtttgtttcaggaagcccatccatcccctagtggaggcaaagaggccatagcagctcttgcccacttcctaccagctcagcagactcttccagcactatcctcacacttcccaagggtggctcttgtaggcagggtgggggtctcatgcccatcaggaatctggaccgactgaggaagggcaggttcataagaaaagtcagggtgctgagaccaaaagatgggacaagggattctgggtgggctaaaacagggggtccccaacagattaagttgcatagaaagtaagctgtccaaattcaaagccaggtgtgatttcatctgaggtccgtgaatggcccaggagatctggatctcgtcctggttttgtcactaattggctggttagaggctcacttgtcccatttgcaaaatagaaataataatacctgtccagtctccgtcactgagttattatagaaatcaaattagaccttgaatttgaaagcactttgaaaagtcagatgcacagtactatattattcatttgtatattttccattggttggttgaaatcagcttaaaattctctatattttcccatagaaaatataattcccattcttattttctttttcaaaaactcattacgaaagcaacacatcctataagcaatttgaaaatatagagaagaaaaagaaagaaaagtgaaataaaagaaaaagaaaaggctgggcgcagtggctcacgcctgcaatcccagcactttgggaggctgaggtgggtggatcatgaggtcaggagttcaagaccagcctggccaacacagtgaaacctcgtctctactaaaaatacaaaaaattagccaggcatggtggcgggcgcctgtaatcccagcttcttgggaggctgaggcaggagaatcgcttgaacccgggaggcagaggttgcagtgagcagagatcgtgccattgcactccagcccaggcgacagtgcaagactctgtctcagaaaagaaaaagaaaaaatcacccatagtctcaccatccttaaataactattattagcattttggtattctttctttcttatctcttctgtgtatatgcccacatgtatatttttgaaaaaaaaaatatgataatattacaatgctctttcaaaatctgctttttccccatcaataatattgcagtctttcatgtggcagtaaatagttttctactacttcaatttaatggcagaatagttttccattgtttaacaaaatacttcttgttagatatttaactatttgtaatttttccctgttagcaaaaatctacccaatctagaaaattttctagatatgaaattttggattgggttcatgtgcatatgtgtgtgcatgcatgagtgtgtgtgtgtgcttaacttttgctcctcctgtgctaatgttttgttcagcctcagaggcccctggcctggcctcatcagattcctgactccctagacaaataaccagccttagttgagcaacttctgagtgcaagccccatgtcctgtctttctacaacccgtgcaggaaggaggctctaaggcctggctaactttctcctagcttacaaattttgcaaaactaaggctttaatatctattgcacttctggaaagtttgcaccaaatcacactctcatgagcagtggccacgtatccattccccatcaccaattatagtaggtatgaccatgttgtaaaactctaacaattgtgataacctttttcttttcaaatttagatctgtggttgcttccccttgattactttttgcaggtggagactcttgtctccttcctggtttgttcaaggtgtcaaaaagttctgagcactggtggcttggaaaattctatagtttgcagggctaaatcggaagaccaaagttcacattccacacccacatttagaagctgtgtgacttttgataatctactcaattttgctgagctacagcgtctatatgtataaaatagagatctatatccagaatgttctgagaattgaaaaaaaaaaataaaaggaaatctagtcctgacacgggcttgcctagctcacatacctgtgatcaaatgaaaatggatgtgaaagccctttcaagaggcatggtcctcagcacacacaagagatgccttgtgtttgctcattcagcttgctccactgtggtagtcagtctccacaatggctcccagtgaaggatgtttcctggtattcatccccttgtgtgttgtcctcttctcttaaagcaaggctggtcctgtgccctgtttttaaataacagaatgcagtggctgggccagcactttgggaggctgaggcgggcggatcacctcaggtcagtagttcaagataagcctggccgatatggtgaaaccccgtctctacaaaaaatacaaaaattagccaggcatgatggcacgcgcctgtaatcccagctactcgggaggctgaagcaggagaatcgcttgaacctgggaggcagaggttgcactgagccaagatggcgccattgcactccagtctgggaaacaaaagtgaaactctgtctcaaaaataagtaaataaaggctgggcatggtggctcacaccagtaatcccagcactttgggaggccgaggcgggtggatcacctgaagtcaggagttcgagactagcctgaccaacacggagaaaccccgtctctactaaaaatacaaaaaaaaaaaaaaattagctgggcatggtggtgggtgcctgtaatcccagctacttgggaggctgaggcaggagaatcacttgaactcggaagtcggaggttgtggtgagtggagactgtgccattgcactccagcctgggcaacaacagtgagattccgtctcaaaaataaataaataaataaataaataaataaataaataaataaataaaagattgcagtcaaagtggtgctgtgtgacttctaaaactaggccttaagactatctgatgaaattgctgagagactctgagaggaagccacccagctgagccccatcaatccacagaaccatgagaggtagtcatacatttttgctttaagccactaggctttggggtgtgttgttacacagtgacggattagcaagacacctgctataggttggtgcaaaagtaattgcggttttgtcgacgtaatggcaccactgcactccagcctgggtgacagagtgagactccatctcaaacaaacaaacaaacaactataatagtgatgataatccctgctgataaagcatctctcttatttggtttccttaattaaattaaatttcttaaagagtatatatctaactaccctgtattttttacccattgcctcagccaccatccctgtggtaccttctctgggcatgcaaggcactcaacacttttttttttgagacagagttttgctcttgttgcccaggctggagtgcagtggagcgatctcagctcacagcaaactccacctcccggtcaggtgattctcctgcctcagcctcccaagtagctgggattacaggcatgtgccaccatgcctggctaattttttgtatttttagtagaaatggggtttctccatgttggtcagactggtctcgaactcccaacctcaggtgatctgcccgcctcgcccttccaaagtactgggattacggcgtgaggcactgtgcccggctcaatactttcaatctgggaaatgtagttttgagtaaagccaggtcttttaaggtattttaagtgggattctaagtcagtttccttaaagaaatgttttacataggttgatgtcattgaccaaatatttactttatttatggccacatttttgaggtctgcattatggcatcttgtgtatccatgtttgtttaagggttgaatcatacttctctttcctcaatgattctaccagaaattcaaaagataaaaagccaggcagctctcaaacacaaatgattgaaaccattgtttcaaaaagaccctctttcacttgctctaaaaacatctgctgagcacctacaatgggccagatcctagtgtaggtgtgagagatgggaagggaagacaacctgtgaccttaagaagtctacagtgtgttagggtcagggttggggagagggtggcaggccagtgaaagactaatactgagagagaagggttggggaagagggaggcacaagaggctgcagaggggaatttctctttttagcttcttagttgagtcactctcctgaaaacaaaagtcggattaacaaaagaaaaacaagcagaagtttattaatgtgtgatgtacccattatgtgaaagaggcctcagttttaaaagtattcctttccaccaggcacagtggctcacacctgtaatcctaacacttcaagaggccgaggaggtaggattccttgagcccaggagtttgaaaccagcctgggcaataaggcaaaaccctgtctctacaaaaaatacgaaaattagccagacgtggcggtgcacacctgtagtcccagctacttgagaggctgaggtgggaggatcatttgagtccaggagcttgaggctgcagtaagccttgattgtgtcactgcactccagcctgggagtgagaccctgtctcaaaaaaaaaaaaaaaaaaaagtatttctctctcaaggcagtggccttgcttaaatagtattttaagaaagagccataaatcctacatagtgacaagacaagagagagagcagttccctttttaaaaggtagggaaaatgtggaaagattgtaaaatctgcttccagattcctctggtacctgctggtgcctcctctgggtgcataagtagtatggaagatccattgatccatccacccacaaacccattcattaacccacccacccatccatccaccaacccatccacctgcccatctacccatccatctatccatccatccatccatccatccatccatccatccatcaatccatctactcaccaacccacacattcacccacccacacatccattcatctacctattgaaccctccacccatctatccacctacccacccatctatccacccaattatccacccacccatccatccacccgcttatctacctgcccactcatccatccagctgcccattcacccacacatccagtttagaaggatttatgtcctgccatcaggcaagtagagggtgaggtagagtgttcccctgtgttttaagggtccttaatttaacaatcctcaatattttagggagaaatatttttatttccttcaaggccatggaaacccacagaaggggagcctcccctgccacatctgtgaccagacttgctggcctggttggggagtaagtggaagtgaggtggagtggcagtcacccacccagcagccattcccaagaccctccttccctaacatgtgggggtggcagtgtgcggcacacaatacaatgtgttcatcttgctgtttcctttcctgggtcaattgcccttcccagccacctctgcagtaggtgaggccatggggccaagttctgactaataggaatgtgagcagagatgcagcccttcccatctggggcagttaaaaaccggtgcacaaaggccgggcgtggtggctcacgcctgtaatcccagcactctgggaggcagaggcaggtggatcacctgaggtcaggagttcgagactagcctgaccaatgtgatgaaaccccatctctactaaaaatacaaaaaaaaaaaaaaaaaaaaatagccgggcgtggtggcatgtgcctgtaatcccagctactcaggaggctgagacaggagaattgtttgaacccgggaggtggaggttgcagtgagccaatattgcgccattgcactccagcctaggcagtaagagtgaaactccctgttaaaaaaaaaaaaaactaaactaaaaaccaaaaaccggtgcaccatttccatctctctcttcccctgctgcagtgatggtggaggctacaagatgaaagggggccactagcacacaaagattgtcaggcgagcaagaaataaacctccattgtgttcagccactgagatttcagggcttacttcttaccgaatcctagcctggcccatcctaatacaatatatatccatttctagtcaataacatgtaagggacatgtgctgtggagtttccttataaatatttccatttccaaagaatggactttccaataaaacaaaagaaacatattaggagtgctcattcatgaccctggcaaggtgtcttcttggttttgaagaaaaatcttattagaatgtgaggcttggaactgtagcagtagagatgtgaacttgggcagagtgatagagatgagagtccagagccctaaccttgtgaaattgctgatctaaactgcgagcatctgattccatacttctttttaaaaagacaataaatgtcctggtggtgtaagtcttttctgttatttgcatttgaatgcacctgcgttgatactagtttcaggtgaggatgagagatggtgataatggacaagtaaaatgaacggcagttctgggggcaggtcatgtcactttcttctctcacgttctctccagctccgtccacactacagtcattgctgaaaaatgaaaataatctgggacagtatttgccatctgcaatgtgctttcacatacattttctggctttagggtgatagaagagtggccacataatgtaggggttgatagctcagcctctagaggcagacacacttgggttcacattctgacttgccaccctttttgctctctgaccttggacaagctctctaaatatagctttctcatctgtataatggaaccattatagaaactcccatatagtgttactgtgagaataaaatgacatgacacttatgaagtgtttaacatatcacctgggatactaaaaacacttaatacacaggagcccctggaatactggattttgattttcttttctgtttttgagatggaatctcactttgttgctcaggctggaatgcagtggtgcaatcttgactcactgcagcctccacctcctgggttcaaatgattctcctgcctcagcctcctgagtagctgggattacaggcacctgccaccacgcctggctaatttttgtatttttgtagagactgggtttcaccatgttggccaggctggtcgtgaactcctgatctcaggttatccgcctgccttagcctcccaaagtgttgggattacaggtgtaagtcaccgtgcccaacctggataacatcctgggatgttatgggataggcattaatattcctattttggagttgaggaaactaaaatttgtacagaatttaagagactggctcaaagtcagaaccagaatttgattccaagtctggtagttcccttttcaaagctctttgcacagtaacatgatgtaaaacaagcagtaaaacaaaagaaaaaatttaaattgattgggctgggtgtggtggcttacacctgtaatcctaacacttcgggaggctgaggcggtgggaggattgcatgagcccgcgagttcaagaccagactgggcatcataatgagacctcgtctctacaaaaaaaattttttttaatttgaggtgcttctcttttgagtgccaataaacagaatcacttccgtaaagttcactccttcaagggaagaaattactactgtggcatatatgcaacatattgttaaactcatttaacagatcaaaatttaattaacagattgctaaatttatgctgataataatatactctacaagtttttttcttaatcctctattatcagcttctcctgccccttacctctaccttacaaaactgaagtgaaaatgcttgccttcataatccatgcaaggtagcacatgtgccattatgcataatttgtgaatcaaacagaataatagcatttttcccccaaggcttttcttctccttcattaaaacctttagtttagaggccatgcctgtaatccaagcatttgggaggcaggggatcgcttgaacccaggagtttgagaccagcctgggcaacaaaaccagaccttgtcactacaaataatataaaattagcagtcgggcacagtggctcacatctgtaatcccagcactttgggaggccgaggaggatggataacgaggtcaggagttcgagaccagcctgaccaacgtggtgaaccccgtctttactaaaaatacaaaaattagctgggtgtggtggtgtgcacctgtaatctcagctactcaggaggctgaggcaggagaatcacttgaacccaggaggcggaggtttcagggagccaagatggcaccattgcactccagcctgggtgacagagcgagagtccacttcaaaaaaaaaaaattagttgggcacacagtggcacctgcttgtagtcccagctattcaggaggctgagtgggaggatcacttgtgtccaggagtttgaggatgcagtgagctaagattacaccactgcactccagtttgggcagcagagtgagaccatgtctcgaaaaacaaacaaaaaacaaaaaaaaaactaaaaaacaaaaacaaaaacctttgtttattatctcctctgatagttcagcattcaaaatagtttacttactgtatttttgaagctaagtgactctcaacatcaagttagtagaatatgaagcaacacccttcactgtatcagaaactggattgatctactgcccttcctctacagcctcatcctttgacatcaaaaagtgaccaataaaatacaaggcatatttttctttaagctctgcctaatgacttacttgcaacctaagtccaggaacaaatactactagtactgaaatagcatttgttttcttaaacctagctcagtcatggccttgtttggaaagcctgtcctctcatccttggggtgactttaatgtggcatttgcctcattgtgctgccattgatctgcattgatgtcggcctggccatggctctgctgaagacgatctctgctttactcttctctccatctctagagccttgcatggcaccttgcttgttgcaaatgggttaaatatttgctgaagcaagtgaggagatcagtgcttgatacatcacctgaaagggataagatttcttcaggaaatttacctgtaatacctattaaaacgttttagtgggagatgtgccgctcctggggtgaaatcaatctagtgaacctggcgggcgaggaggtgaaggccataatcaggtgctaactctttctcctcggtgcgtaccattccttctttctatggttgcttgatttgggtgacacaacatgaatgtggttctgagtgctcctatctacttctggatcatgggacagtccccagggctcagtcctctctactcctttctttgtcatctctctggattctgtctacgcactctacgaaaacccctagcttggtcttgatctttcacccttatttgggtgttaccacttatttgcagtgttaccatctgcaggcaggatggcagagaggacgccccttggatgtcttgctaatatttcctactcaaccatcaaggccaaaaataattagattcaaaagcagagagcacagcacagaggacaaagaagaagggaatcaagccaataaaccgctaggtttgccttaggaagacgaagcactggggggcttggaaagaacgaagttgctggaattgtgtcatacaagcccagatggtaggggccctaacaaccattgccttcgggagcctgggcctccttccctctcctgcaaatctgctctgtgatcttggaaaagtcactttcctctctgggactccatttcatcagggttaaatgagatcacgggtttccaatcttagtaatgcatcagatgttttggagatgctttggagagcttgttaaaaatgcagcttcttccagatgttctgatttaggagatttgggggaagccaaagaaccaccgttttcaacaagctccatgagtgagggatttcctggacaaaagacactggagtagatgatctcacagttcctttccagccctgacactccctcggttgtctgattaggggagcagagggtagccaggaaatgctggcagccagccagctctctgtccaagaagtgtagccaggaaagaagccagatggcaggtggaaggggagggtcagggagggtggtgttcacggtgtcattgacatcagcacctctttaattgaactggacgtggggagacctccggcgtaagacccgggagggaaccaagaaccttccttggttttcctcccaccccagcctgagcgaatcactcttcttttgccccattcagatgctccaaacaaacgttacgaaccgaaaaatgagtttgtcccacagtgttaaaacttttattagatttcatattttaaaattccaacaaacaaacaaataaaattccagatttctcttggaaaatctaaaaagatcagttacactggactcagagcgccctgggacatcagctggcgctgagcagctgcgccccctttgggtgaaagcatgcatttgcagcctctgcgatcgtcagtggccagcctgactcatggtccttaacctgtcaggcccccgtcagagggggcgttagagggggctcccttcaccctgaaatttattctgggataagccagaacagcagagaactgctggatgtaactggacattgagaattatggagtagcctctggtactgaggtttcttgcctatgtggaaaggtattaagaaatcagtggggtctggcgcggtggcccacgcctgtaatctccaggactttgggaggccgaggagggtggatcacgagatcaggagttcgagacaagcctgggcaacatggtgaaaccctgtctctactaaaaatacaaaaaattagccgggcgtggtggcgggtgcctataattccagttactcgggaggctgaggcaggagaatggcctgaacccgggaggcggaggttgcagtgagctgagattgcaccattgccctccagcctgggcgacaagagtgaaactccgtctcaaaaaagaagaaaaaaatcagtgaagtgggactgactgctgtgtttacgacaggactgctgtggagaacatcgaccactacactacacggtttcttctctgtggaggcccagtggaggaatggatttctttagtctcagtaccaacagtgcttctagttgtgtttcttctgaggatcagttgtgtttttaagtcctctaaatggtgtacaggatggtttctttttttctttttctttttctttttttttttatactttaagttctgggttacatgtgcaaaacctgcagttttgttacataggtatgcaggtgccatggtgatttgctgcagccatcaacccgtcacctacattaggtatttctcctaatgctatccctcccgtagccccccaccctcaacaggccccggtgtgtggtgttcccctccctgtgtccatgtgttctcattgttcaactaccacttatgagtgagaacatgtggtgtttggttttctgatcttgtgatagtttgctgagaatgatggtttccagcttcatctatgtccctgcaaaggacat

SEQ ID NO: 22649 - DNA, 3393 bp, Homo Sapiens
gtttccgggacgttcggagggtggcctctctcccaccgggttccgcataccccaggcaccggcccgcatccaagtgtcaggttggagccgggaagcggccctggtggtagcggcggcgggggcaggatgagcgcggaggcggcggaccgggaggcggccacctccagccggccctgcaccccgccgcagacctgctggtttgagtttctgctggaggagtcactgttggagaaacatctgcgcaagccctgcccggatcctgcaccagttcaacttatagttcagtttttggaacaggcttccaaaccttcagttaatgaacaaaaccaagttcaacctccgcctgataacaagagaaatcgtattttaaaactacttgctcttaaagttgctgcacatttgaagtgggacttagacatattagagaaaagtttgtctgttccagtattgaatatgctactaaatgaactactctgcatcagtaaagttcctcctgggacaaagcatgtagacatggatctggccactttacctccgaccactgccatggctgtacttctctataatagatgggcaattaggacaattgttcaaagtagttttccagtcaaacaggcaaaacccggaccccctcagttaagtgttatgaatcaaatgcaacaggaaaaagagctaacagaaaacattttgaaagtgctcaaagaacaagctgctgattctattttggtactagaagcagccctaaaattaaacaaggatctttatgtccatacgatgagaactctagatttattggccatggaaccaggcatggtaaatggagaaactgagagttctactgctggattgaaagtcaaaaccgaagaaatgcagtgccaggtgtgctatgatttgggcgcagcatacttccagcaaggctccacaaattcagctgtctatgaaaatgccagggaaaaattttttagaaccaaagaactaattgcagagataggttcattatctcttcattgtaccatagatgagaagcggttagctggctattgtcaagcatgtgatgttcttgtaccttcttctgatagtacatctcaacagttgactccatatagtcaagtccatatttgtttgagatctggcaactatcaggaggtaatacagattttcattgaagacaacttaaccttgagtttacctgtccagttccgacagtcagtcctaagagaactctttaagaaagctcaacagggaaatgaagctctagatgaaatctgttttaaagtttgtgcctgtaatacagtccgtgatatactggaaggcagaacaattagtgttcaatttaaccagctatttcttagaccaaataaagagaaaatagactttcttcttgaggtatgttcaagatcagtaaatttagaaaaagcttcagagtctttgaaaggaaacatggctgcttttctaaagaatgtgtgtctggggttggaagatctgcagtatgttttcatgatttcttcacatgagcttttcattacattgttgaaagatgaagaacgaaagctacttgttgatcagatgaggaagagatcccctagagtaaatctgtgcattaaacctgtaacttcattttatgatatcccagcttcagcaagtgtcaacattggtcagttagagcatcaacttatattgtcagtggatccttggaggattagacaaattttaattgaattacatggtatgacttcagagcgccagttctggacagtgtctaataagtgggaagtaccttctgtctatagtggtgttatcctgggaattaaagacaatttaacaagagatttggtttatattcttatggccaaaggtttgcactgcagtactgttaaggacttttcccatgctaaacagctctttgctgcttgtttggagttggtaacagagttctcaccgaagcttcgtcaggtcatgctgaatgagatgttgcttttggatattcatacacacgaagctgggacagggcaggcaggagagagaccgccatccgaccttataagtagagtacgaggctatctggaaatgaggcttcctgatattcctcttcgtcaagttatagctgaggaatgtgttgcctttatgttaaactggagagaaaatgaataccttacactccaagttcctgcatttttgcttcagagtaatccatatgtaaagcttggacagcttttagcagctacatgcaaagaacttccaggccctaaagaaagcagacggactgccaaagacctttgggaagttgttgttcaaatctgtagtgtgtccagtcagcacaaacgaggaaatgatggcagagttagtttaataaaacagagggaatctacgttaggtatcatgtatcggagtgaactgctttcttttatcaaaaaattacgagaaccactcgttttgactattattttatcactctttgtgaaacttcacaatgttcgggaggacattgtgaatgatattacagctgaacacatttctatttggccatcttccattcccaacctccagtctgtggactttgaagctgtggcaatcacagtgaaagagctagttcgatatacactcagtataaatccaaataaccattcttggttaattatccaggcagatatttactttgcaacgaatcagtattcagcagctcttcactattacctccaggcaggagctgtgtgttctgacttctttaacaaggctgtgccccctgatgtttatacagaccaggtaataaaacgaatgataaaatgttgttctttgctgaattgccacacacaggtggctattttatgtcagttcctcagagaaattgactacaaaacagcgtttaaatctctgcaagaacaaaacagtcatgatgctatggactcctactacgactacatatgggatgttaccattttggaatacttgacttatcttcatcataaaagaggagaaacagataaaagacaaattgcaatcaaagccatcggccagacagagttgaatgcaagcaatccagaagaagtgttacagctggcagcgcagagaaggaaaaaaaagtttctccaagcaatggcaaaactttacttttaagcagttaaatttttttaacttttattttttaaacaatgggctaaaaataaacagtattaaaaggttaagtttatataatacatatgtacacaattagtggtgttttcttttcagacaaaatactgaaacaaatattagtttaaaaacaaactatacagaagacttcataccgtaacaataaatgtatagtttcttcaaagggagaagagattcacatatctgataacaaaataaactagcaatctagttttctaatctaaaaaaaaaaaaaaaaaaaaa

SEQ ID NO: 22650 - DNA, 4646 bp, Homo Sapiens
ccgggccccgccatggccggggtcagctacgcggcgccctggtgggtgagcctcctgcaccggctgccccacttcgacctgagctgggaggccactagcagccagttccggcccgaggacaccgactaccagcaggccctgctgctcctgggggccgccgccctggcctgcctcgccctggacctcctcttcctgctcttctactccttctggctgtgctgccggcggcgcaagagcgaggagcacctggacgccgactgctgctgcacggcctggtgtgtcatcatcgccacgctggtgtgcagcgccggcatcgcagtgggattctacggcaacggggagaccagtgatggcatccatagggccacctactcgctccgccacgccaaccgcacggtggccggggtccaggaccgcgtgtgggacacggcggtggggctgaaccacacggcggagcccagcctgcagaccctggagcggcagctggccgggcggcccgagcccctgcgagccgtacagaggctgcagggcctgctggagacgctgctgggctacacggccgccatccccttttggaggaacacggcggtgtcgctggaggtgctggcggagcaggtggatctctacgactggtacaggtggctgggctacctgggcctgctgctgctggacgtcatcatctgcctcctggtgctggttggcctcatccgcagctccaagggcatcctggtgggggtctgcctgctgggagtcctggccctggtcatcagctggggcgcgctgggcttggagctggctgtgtccgtgggctccagcgacttctgtgtggaccctgacgcctacgtgaccaaaatggtggaggagtactcggtgctgagtggggacatcctgcagtactacctggcctgctcgccccgcgccgccaaccccttccagcagaagctgtcgggcagccacaaggcactggtggagatgcaggatgtcgtggctgagcttctgaggaccgtcccctgggagcagccggccactaaggaccccctcctccgcgtccaggaggtgctgaatggcacggaggtgaacctgcagcacctcaccgccctggtggactgccgcagcctgcatctggactacgtgcaagcgctgaccggcttctgctatgacggcgtggagggcctcatctacctggccctcttctccttcgtcacagccctcatgttcagctccatcgtctgcagcgtcccgcacacctggcagcaaaagagaggccctgatgaggacggggaggaggaggccgctccagggccgcggcaggcgcacgacagcctctaccgcgtccacatgcccagcctgtacagctgtggcagcagctacggcagtgagaccagcatcccggccgcggcccacaccgtcagcaacgccccggtcactgagtacatgagccagaacgctaatttccagaacccccgctgtgagaacaccccactcattgggcgcgagtccccgccgccctcatacacctccagcatgagagccaaatacctcgccacgagccagcctcgccctgactccagcggcagccactagaccgcgcccggcagccacccaccccacgtgccaacttcccctccccgtgccagcactgccgcttccacctgggccacccaccggaccctcgcacgccgtgccaggcctgccccagacgcgtctgcaggccgcttgccctcctgtcccctccccgcaggggcacagtggagacgcaggggctctgggcccgtaccgccaactcgggtcacacctgaacgctgctgccagccgatgccccagccctgcacgccacccactatcccggcacgctccctctgcagatggtcgccgcacctacaagccctggccgcacccaacctgtgttgttgccgcccggcccttccctccacagctctccttcctcccgcccggcacttctgtggaccccttcttagttcacaggcacggctggggccgctctgtgctggcgcctgctggccactgagggacagggacacgtgccacctgctcatctctgccctgaggtcaccccgtggtccctccacgtgcccatctctctgcagtgccctcctcgcctgtgcagcccgcccacccacaggctcacccctcctgccggctgccagaggccccctccagcagggcctctctccgttgccccagcttcactctctccctcagcacctgccctgctggaggccccagccctccgtggacagcaggggccacgtggagcccgggccgctcacccgccacccagtgctggccgccttcttggtgccaaacccccttcccccacccagagactgggcagctgtgtctggttcgttctttgcactaaccacatttgtcatctctagggcaggctggggctgcgggctgagggggaccgctggcaccccccttccctcccttcttggttccatttccatccatgacaggtacagcatcccaggagcccggcctgaggggctggacccgagctggctgtgaacatccctcagcccctgctgtccccccttgggactaaccactaacctcacccccaaactccacgggtgcccctagctggcccagagccggcagtgtgagcccaagtccgggctggagccgaggccggagcagctgtctgggagtcaaggctgcagtagcgtttcttcatggggtgctccagggggtgccacagaccgacaggcagcccaagggcctggacacccctccccaggcaggtgctgccccaggaggactgtcctcgggaatgaacctcccgcgggctttggactgaggtccctgtggcctcggtctcctccccatgaagtgggagcgaggctccccaatggtgcttttggctttagtgtacgatgtttgctgtgcttcccgccgtggagggcagagccaccccacatcaggatcggacgtgctacccctcccggtcccggccctggcccagccagcccagccctcgaggctcgatgcctgtgccaaggccaggggcagccagagggcagctggatggccacgtgcaggggtcaaggctgggccctgcagtggggcgggccgccagccccagcagtttacagacgcatggctcttcctcccagagcagccggcagctacctggaccggaaatgtcctcatcccctccctggggccaggctctgccctggccttcctctgtgaacccctcctttctttgtgctggtgtctgggaccaaaaagggggaatatgggagggcagagtggggaggggagtccatgggcctggggccccaagccggggcgtctgagctccccaggcatgaccaaacctcagtggaggggcctctgcttcaggccccgcctggctgacattctgagcccccctcggaggccccgccacagccaacctgcccagtctttcctctgggcttgacccgccaggggagttctccaggcctagggccaggagagaggccctggcaccctggcgtgggtgcccgccaaacgccctgcgaccgctcagaagcacaaatgctgtccatggccgtgaggctgcctgccaggtgaatggacatagcgtgagaggcggtgaggccagggcttccagcctcgtgctgtctcgggactcctgaccgtggtgtgcgtgtgtgcccgtctgtgactttctactcaccaaggttgaagaaaggaaacggggaaaatcaaaaggggttcaaaccccacctcagtaggtggaggggagcgcctgccattggttgtatttttgttctgagttttcggtgccgtgttcctaactactccatcccatgacctcgccacacctactggggcatctggctggtgcctgctgccatggccagcccccactctcaccctgcacagggggtcttgcagcccccaggcccacagcctcgttgggaggacagggtggccctggggacaagagggaggagcccaggggcttacctcactgagagtgctccccagcaggcatccactaccccagggccccccacatgtcatggcaaggttggtagtgaatgggcctggttgggagcagcccctggcccattgcccacccacccatctcactatgcaattcgagttccaagcaacatttgctcctgccctggggccagctctgccccagccctgagaggggtggtgaggcagccccctggaccccagaaccccagacaagggggcaggcgggggaccagggcctctcctgtgggatctttgttttgtgtttaaccataatggttgtgtactgaaccacttcatatttgttatatataatatatatatatataatctccttaagactcagcctcctggtttacccccccggcctgggcatctgacctcccccaccccagtgtgatttaacatccaggaactgaggcctgaaccattttgcatttccccctcctccagcctctgtagggccatggctgtatgtactgtcgctgtgtttttttgtttttttagaactgggtttgggggctgatttttatttctttgggggcttttttttcttggcaaatactaaaaatctcgtcaatgtaatttctgtggtttctattcagcttgggtttcatgttttaaaataaattttaaaaagc

SEQ ID NO: 22651 - DNA, 3867 bp, Homo Sapiens
atggcggggccgtgtccccggtccggggcggagcgcgccggcagctgctggcaggacccgctggccgtggcgctgagccggggccggcagctcgcggcgcccccgggccggggctgcgcgcggagccggccgctcagcgtggtctacgtgctgacccgggagccgcagcccgggctcgagcctcgggagggaaccgaggcggagccgctgcccctgcgctgcctgcgcgaggcttgcgcgcaggtcccccggccgcggccgcccccgcagctgcgcagcctgcccttcgggacgctggagctaggcgacaccgcggctctggatgccttctacaacgcggatgtggtggtgctggaggtgagcagctcgctggtacagccctccctgttctaccaccttggtgtgcgtgagagcttcagcatgaccaacaatgtgctcctctgctcccaggccgacctccctgacctgcaggccctgcgggaggatgttttccagaagaactcggattgcgttggcagctacacactgatcccctatgtggtgacggccactggtcgggtgctgtgtggtgatgcaggccttctgcggggcctggctgatgggctggtacaggctggagtggggaccgaggccctgctcactcccctggtgggccggcttgcccgcctgctggaggccacacccacagactcttgtggctatttccgggagaccattcggcgggacatccggcaggcgcgggagcggttcagtgggccacagctgcggcaggagctggctcgcctgcagcggagactggacagcgtggagctgctgagccccgacatcatcatgaacttgctgctctcctaccgcgatgtgcaggactactcggccatcattgagctggtggagacgctgcaggccttgcccacctgtgatgtggccgagcagcataatgtctgcttccactacacttttgccctcaaccggaggaacaggcctggggaccgggcgaaggccctgtctgtgctgctgccgctggtacagcttgagggctctgtggcgcccgatctgtactgcatgtgtggccgtatctacaaggacatgttcttcagctcgggtttccaggatgctgggcaccgggagcaggcctatcactggtatcgcaaggcttttgacgtagagcccagccttcactcaggcatcaatgcagctgtgctcctcattgctgccgggcagcactttgaggattccaaagagctccggctaataggcatgaagctgggctgcctgctggcccgcaaaggctgtgtggagaagatgcagtattactgggatgtgggtttctacctgggagcccagatcctcgccaatgaccccatccaggtggtgctggctgcagagcagctgtataagctcaatgcccccatatggtacctggtgtccgtgatggagaccttcctgctctaccagcacttcaggcccacgccagagccccctggagggccaccacgccgtgcccacttctggctccacttcttgctacagtcctgccaaccattcaagacagcctgtgcccagggcgaccagtgcttggtgctggtcctggagatgaacaaggtgctgctgcctgcaaagctcgaggttcggggtactgacccagtaagcacagtgaccctgagcctgctggagcctgagacccaggacattccctccagctggaccttcccagtcgcctccatatgcggagtcagcgcctcaaagcgcgacgagcgctgctgcttcctctatgcactccccccggctcaggacgtccagctgtgcttccccagcgtagggcactgccagtggttctgcggcctgatccaggcctgggtgacgaacccggattccacggcgcccgcggaggaggcggagggcgcgggggagatgttggagtttgattatgagtacacggagacgggcgagcggctggtgctgggcaagggcacgtatggggtggtgtacgcgggccgcgatcgccacacgagggtgcgcatcgccatcaaggagatcccggagcgggacagcaggttctctcagcccctgcatgaagagatcgctcttcacagacgcctgcgccacaagaacatagtgcgctatctgggctcagctagccagggcggctaccttaagatcttcatggaggaagtgcctggaggcagcctgtcctccttgctgcggtcggtgtggggacccctgaaggacaacgagagcaccatcagtttctacacccgccagatcctgcagggacttggctacttgcacgacaaccacatcgtgcacagggacataaaaggggacaatgtgctgatcaacaccttcagtgggctgctcaagatttctgacttcggcacctccaagcggctggcaggcatcacaccttgcactgagaccttcacaggaactctgcagtatatggccccagaaatcattgaccagggcccacgcgggtatgggaaagcagctgacatctggtcactgggctgcactgtcattgagatggccacaggtcgcccccccttccacgagctcgggagcccacaggctgccatgtttcaggtgggtatgtacaaggtccatccgccaatgcccagctctctgtcggccgaggcccaagcctttctcctccgaacttttgagccagacccccgcctccgagccagcgcccagacactgctgggggaccccttcctgcagcctgggaaaaggagccgcagccccagctccccacgacatgctccacggccctcagatgccccttctgccagtcccactccttcagccaactcaaccacccagtctcagacattcccgtgccctcaggcaccctctcagcacccacccagccccccgaagcgctgcctcagttatgggggcaccagccagctccgggtgcccgaggagcctgcggccgaggagcctgcgtctccggaggagagttcggggctgagcctgctgcaccaggagagcaagcgtcgggccatgctggccgcagtattggagcaggagctgccagcgctggcggagaatctgcaccaggagcagaagcaagagcagggggcccgtctgggcagaaaccatgtggaagagctgctgcgctgcctcggggcacacatccacactcccaaccgccggcagctcgcccaggagctgcgggcgctgcaaggacggctgagggcccagggccttgggcctgcgcttctgcacagaccgctgtttgccttcccggatgcggtgaagcagatcctccgcaagcgccagatccgtccacactggatgttcgttctggactcactgctcagccgtgctgtgcgggcagccctgggtgtgctaggaccggaggtggagaaggaggcggtctcaccgaggtcagaggagctgagtaatgaaggggactcccagcagagcccaggccagcagagcccgcttccggtggagcccgagcagggccccgctcctctgatggtgcagctgagcctcttgagggcagagactgatcggctgcgcgaaatcctggcggggaaggaacgggagtaccaggccctggtgcagcgggctctacagcggctgaatgaggaagcccggacctatgtcctggccccagagcctccaactgctctttcaacggaccagggcctggtgcagtggctacaggaactgaatgtggattcaggcaccatccaaatgctgttgaaccatagcttcaccctccacactctgctcacctatgccactcgagatgacctcatctacacccgcatcaggggagggatggtatgccgcatctggagggccatcttggcacagcgagcaggatccacaccagtcacctctggaccctga

SEQ ID NO: 22652 - DNA, 5058 bp, Homo Sapiens
gaagctctcctcgcggggcgggccggccggccgcacccccggcctggggcctccggtcgtagtaaagcgcaggcgggcggggaggcgggagcaggagcccgcggccggccagccgaagatggtggcggctactcctcctgtcatacacgtggacctaactgcaccagtagcttttctgagaatacttgctgaaaaggaagttttctggaatgggtaagtgtattctgattttcttgaacttttcttaaaaacaaatttttcttgctattaaagttgaataaataggattggtttcttagagagtaaaagtaggtgtttctttctttagacaatgtaccttttctgaaaaactaactcattaagtacggatttgctaattttaaggtagtaaaattacagtgtaaatattcctgtacatttttggaaactggcttatgcagtttacgaaatataattttagaccctcttttaagttgggtgataaagtagatataacctgagatgatagatttaaacaggatatttacgttctgctacaattgactgataacacttgaagtgtagtctgaacagtaattttgttaatcatttcaacaagtatttgctaagtggaagccagaagaggaggaaaatgttttgccacgtggatgtgaagatttcctctaaaaggtacacatggactaaattgcctttaaatgttccaaaattagttctcatttatttgcagtctcattttgttttgttttttttctctatgtgtcaatccatttgggagaggccagccattggaagagccaccacttccagtgctagttggatggttggttatgattgccttctgtaaagaattcttaaggcataaatacgtgtctaaatggacctcatatctttgagataattaaactaattttttcttccccattagggattatgctgaatttgtatggtttatagttgttagagtttgaggtgttaattctaattatctatttcaaatttagcaggaaaaaagagaacatcaccttgtaaaactgaagattgtgaccagtcagaataatgtcaaagtgcttacagtgcaggtagtgatatgtgcatctactgcagtgaaggcacttgtagcattatggtgacagctgcctcgggaagccaagttgggctttaaagtgcagggcctgctgatgttgagtgctttttgttctaaggtgcatctagtgcagatagtgaagtagattagcatctactgccctaagtgctccttctggcataagaagttatgtattcatccaataattcaagccaagcaagtatataggtgttttaatagtttttgtttgcagtcctctgttagttttgcatagttgcactacaagaagaatgtagttgtgcaaatctatgcaaaactgatggtggcctgctatttccttcaaatgaatgatttttactaattttgtgtacttttattgtgtcgatgtagaatctgcctggtctatctgatgtgacagcttctgtagcactaaagtgcttatagtgcaggtagtgtttagttatctactgcattatgagcacttaaagtactgctagctgtagaactccagcttcggcctgtcgcccaatcaaactgtcctgttactgaacactgttctatggttagttttgcaggtttgcatccagctgtgtgatattctgctgtgcaaatccatgcaaaactgactgtggtagtgaaaagtctgtagaaaagtaagggaaactcaaacccctttctacacaggttgggatcggttgcaatgctgtgtttctgtatggtattgcacttgtcccggcctgttgagtttggtggggattgtgaccagaagattttgaaaattaaatattactgaagatttcgacttccactgttaaatgtacaagatacatgaaatattaaagaaaatgtgtaactttttgtgtaaatacatcttgtcttgttttcattcaaaaacatttcacttttggggttgcgtgtcagatttggcagtataaattctggctatattttttgttgttagatttatttggctgttaagtattgcgatatgactaaacatactgtatacctgatgatcatctgtaaagttagagtatatctttttgctttctttggagttagtgttattccaggatattttacttaatctaaaagttaatttatgttgctcatatattactcaagtatttaaatttagagagaatgccgctctgtttaaagcaatgtgtaaagatgagtttttttaagcatggaatttagggttggggtacaatttgtttctattaagcaagtaccagtttaccaatacatgagtaactgaagtgtaactgttaaatgcttgtatactagtttttctttctgattgtcagtgatttataagctataaatgaccaaggtcctcagactgcttttagcatctgcaacttaaaaaaatgggagttagaaaaagaacaaatgctaaatagagtaacagttaaatgtatgtgtacactcttcccaaatgccaagagtgcagcggtggggtgagattcagatattcatttatttctaagtctgtagttaacatttatgttccctactccctacgtaagccagactttggcaacagtgatagttgattccaggcttatttgacttaaagtcactgaagtggaaactaagaagtggcagttagtgttttacccagcatttctgccttctctcttttcttcatgtgtttttgtctctagcctatgtgtatttgtgtagaataatgtgggatacctgaataatagatttaaaaggaccaagtggtaaaattgggcccaagctgaagtacaggcaaacttgatgtttgaaagataagttttgagaaatgtcattgtattttggagtaaaagaggctatcttagtaataagaaataaacttccataacactaggttagaccacccaataaatctagaaatcagcttttaaaaatattgtctgaagtctaacaaaagttttcacctctaatgtgttctttaagaaatttaaggaacttagccttggattcctgaatagaaaggtaagaattctatcattctggagttgatgaaaacataaattttcaggatgtgaaatgaacagtgatttataaaatggaaatcaaattgtacattagcagagttcttaagctttttgaattgaaggagacctaataattgtgtctttttggttatttagtgacaaacgtggctttcaaactatgcttaaaaagttccggctggacacggtggctcacacctataatcctagcacttggggaggctgaggcagacggattacctgaggtcaggagttcgagaccaacctggccgacatggtgaaacgctgtctctactaaaaatataaaaaattagccgggtgcagtggcgtgcacctgtaatcccagctactctggaggctgaggcaggagaatcacctgaacctgggaggtggaggtttcagtgagctgagatcctgccactgcactccagcctgggcgcaagaccaagacttaaacgcaaaaaaaaaaaaaaaaaaaaaaaaaaagtttcataatacagcatggtctggtagtttgcaaaatggtgtgcttttggggagatacactagcaatttttttaaaaactggaacagtgtgataggaagcctgctggatgatttcttaaatattctaaaatgtaagtcaaatatgttttaataacaaagacttaaatggcttttctccctagagactgaaactagtattcattgtgttcagaacttaattgggcttgaactgagatttaaatctaataaacaagttaataaatgtgtatgttttgttgtgggtttggtagtgatctgtggttctatagggtttaataggaattgcttttgatttgtttctggctttagaatgtgaggcaaattttacattcttggttctattaagattttcttaggcatgctaacatgccaacaaaaagccatgtaagtattgtataaaaagattcacattgttaatttagccattttgaaattcagatgagtgagcaagttgataatggcctcatctctgacctgagaaaaaacaactttgacccttgttcttaaaatgctttaaccttgaagttgcttgagacttaagaggtcatgttgctttaggtttaataaatagccttaactatttggaggggaaaaaatgggtcaacttttttttttttttttggcgtttgcatgtacaactttctatttttagcctatatttggaaagaaagcacttaacattttaggaattctttttaaagctgcttgcaaagtgttggtgattttactgaaaacttttgagatcttcattttacaggcagacctgtctaactacaagccagacttgggttttctcctgtagtttgaagacacactgactcctgacaaaatgcagcctgcaacttcctggagaacaactcagtgtcacattaaagtttattatgtatttaatgatacactgtttaattgacagttttgcatagtttgtctaactttagagaattaagagcctctcaactgagcagtaaaggtaaggagagctcaatctgcacagagccagtttttagtgtttgatggaaataagatcatcatgcccacttgagacttcagattattctttagcttagtggttgtatgagttacatcttattaaagtcgaaattaatgtagttttctgccttgataacatttcatatgtggtattagttttaaagggtcattaggaaaatgcacatattccatgaattttaagacccatagaaaagttgaagaatgcttaattttcttatccagtaatgtaaacacagagacagaacattgagatgtgcctagttctgtatttacagtttggtctggctgtttgagttctagcgcatttaatgttaataaataaaatactgcattttaaagctgttaagaaattgtccagaacgagaatattgaaataaaaacttcaaggttattatcgcagtttttatggcgtttttgttttgtcactac

SEQ ID NO: 22653 - DNA, 691 bp, Homo Sapiens
atacgtggctttcctgaagctgttcctggagacggcggagaagcacttcatggtgggccaccgtgtccactactatgtcttcaccgaccagctggccgcggtgccccgcgtgacgctggggaccggtcggcagctgtcagtgctggaggtgcgcgcctacaagcgctggcaggacgtgtccatgcgccgcatggagatgatcagtgacttctgcgagcggcgcttcctcagcgaggtggattacctggtgtgcgtggacgtggacatggagttccgcgaccacgtgggcgtggagatcctgactccgctgttcggcaccctgcaacccggcttctacggaagcagccgggaggccttcacctacgagcgccggccccagtcccaggcctacatccccaaggacgagggcgatttctactacctgggggggttcttcggggggtcggtgcaagaggtgcagcggctcaccagggcctgccaccaggccatgatggtcgaccaggccaacggcatcgaggccgtgtggcacgacgagagccacctgaacaagtacctgctgcgccacaaacccaccaaggtgctctcccccgagtacttgtgggaccagcagctgctgggctggcccgccgtcctgaggaagctgaggttcactgcggtgcccaagaaccaccaggcggtccggaacccgtga

SEQ ID NO: 22654 - DNA, 49634 bp, Homo Sapiens
ctgtgtctcctgggcttctcaggaagtccctggactggtcaggcaagttcccaggtgtcccctccaggctctgagcactagagccagagctcccaccagtcagaaaggcagagcaaacacctctcaaaggtaggaggacagcgtaacatcatcacttcctcaagttctgtgatgacgggaggcagccacaggctaactgggcaggaaggtgggcctagatctcatttcccgagggggaaaaaaaagcccaaacaggatgttttaggtgaaatctcccaattttggctgggtgcggtggcttctgcctgtaatcccagcactttgggaggctgaggcaggtggatcatgaggtcaggagtttgagatcagcctggtcaatatggtgaaaccctgtctgtactaaaaatagaaaaaattagttgaccatggtggcacgcgcctgtagtcccagttctttgggaggctgaggcaggagaatcacttgtactcaggaggcagaggttgcagtgagccgagatcacgccactgcactccagcctgggagacagagcaagactccgtctcaaaaaaaagaaaagaaagaaatctcccaatttttaaatgtcagctcattcagattgaattcagatttaaaattataccactgttggccgggcatggtggctcacgcctgtaagcactttgggagcctgaggccagcagatcactgaggtcaggagtttgagaccagcctggtcaacgtggtaagaccccatctctactaaaaatacaaaaattagccaggcgtggtggcgggcgcctgtaatcccagctatttgggaggctgaggcaggagaatcacttgaacctgggaggtggaggttgcagtgagccaagattatgccactgcattccagcctgggtgacagagcaagactccgtctcacaaaacagaaatacattaattaattaaaataaaattataccactgcctcaaccagattctgcactcaggttgagcctctgtctcataacttcagctttggaaccagacagcctgggttcaaatcatcagctctgcaatttctttgctgtgtgcctttgagcacgtggcctaacatctctgtgcctcagtttcatcatctttaaaataggaataaaaatcatatctatctgagctgggctctatggcatgtgcctatagccccagctacttgggaggctgagacagcaggaccgcttgagcccaggagttcaaaaccggacaacatcgtgatatcctttttcaagaaaaaaaaaaatcacatctacctctaagggttattgtgataattcagtgggttattatttgtaatatatagcatatttaaaccttgccactgggacaggcacagtggctcacacctgtaatcccagcactttgggaagccgagatggctcacctgaatctaggagttcaagaccagcttggtcaatatcattaagactccatctctatacaatttttttgtaataaatttatattatattaaaacacatttttttaaaacccaaaaggctcataaggtaaggtgattggccttacctcctgtcacagagcaatcacgtgggacagctctggaactcagagctctgggcatcactccagccatctctgcctgttgcaccctttcaggctgcctgggcctggctctgagattggccagggcagaggacacgcacgcccttccctggcccagtcagctgcccacctagctggggcctgggagctgactcctgctgggtcctctcttgccccagagctggagatggtcaaagcccggaaccaactggatgctgtcttgcagtgtctgctggagaagagtcacatggacaggtaggccagcgtggggtcacagggccgggcaccctggtgggttgggccctctgatcctgggtggattgggtgggaccccacaggctgacttggggaggaaggtgcttaatggggaggctgctcggtgccttccttctctggggccctggaaccctgagctgagagatctcttctgcctctagggagcgtctggatgaggaagctgggaaaacaccctcagacacccacaataagtgagtttttctgattggatttggagttgagagttcgtggttggtaacttctttccttatccaagccctgaccgctcagcccagcgctacctccatcgtggcccggaccactccacctgtacaaagaccctgtggcaggagaagcttaggtccccccgtggttgccacctagacccccatgggtatgggtgggacaaaaggcccaagaggcaagtggggttcatgtgagcatctcaggtttgataccagtatccccagggtgccctctgcagggttttgcacaggcgtttgtctgagggtcaactgtctttccccacagggactgctccatcgcagccactggcaaaaggtaaggtggcagggtcccagccagctgactagaggctcccagctcctaccccagtcctgacactccctctccctacgcgggccatctgcccgcttcccccaccagcggaggaagaagaggagggagatggatgatgggctggctgagggagggccgcagcgatccagtgagtagacagtggccctagagggtcggtaaggagccaagggcctatgcaaggatgctcacacacctcccatccccaccttcccagacacatatgtgatcaagctgttcgaccggagcgtggacttggcccagttcagcgagaacacgccactgtacccaatctgccgcgcctggatgcgcaacagcccctctgtgcgcgagcgtgaatgctctcccagctcacccctgcccccgctgcctgaggatgaggaggtgggatgggtagtgggtcccagcccagcagcctggtgccagggcagtgggtggataggctcaaaggatcctgcccctaagctagtgggatagacagacacaggtccctcacgtgaatcctggatcaggctaggcacacagatgtgcactcttaggttggggtgtggatcagagtccctagggaagacatacgtaaccacctggcctgggagacagggaacagggttaccctggacagttagatgtggacctccaagatcaggggttcccaagagccgaggggctagacaagggtccttagtacagacagaagtggccaccaggccttgaggagcaggggctgggcaggaatggatgggagtctataagccatctgacccagcggggtagacaagggtccccaggacagacatataggacccttcagacatataggactgtcagaaatggacagagcttcctaggtggcacagacgtgaccccctagacaggattccctgaggcaggcagacgcgactccctgggctgacaggtgtagatggagtctctgggctggataggagaagacaggggtccctggggcaggcacacttgacccgctggctggttgaggtgtctgcccttcatacatgcctcctgtctgagtcccttagcgagcccctcatgccatttgttgctgggaaaggcaggagggatgaatgtggattcccagcccctctgctttgactctcttgggcctggcatggggcccttgtgtccccagggctcagaggtaaccaacagcaagagtcgtgatgtgtacaagctgccgccacccacacccccggggccacccggagatgcctgcagatcccgcatcccatctccactgcagcctgagatgcagggcacccctgacgatgaggtgagtatgccaggctggcccagggttatggggcacatgcggtagggctcaggaatggccactcaacctggcctgtctgtccatgcagccctctgagcccgagccctcaccctccacactcatctatcgcaacatgcagcgctggaaacgcatccgccagaggtgagcgtcccccagcctgcttgcccctcgtagggccctttgcaactgctgagtctcccctctgcctccccaggtggaaggaggcctctcatcggaaccagcttcgttactcagaaagcatgaagatcctacgagagatgtacgaacgacagtgatgttcccaggtccccccacaccagtaaacatcccccagctccacactggtgtctgctccggtccctccttcctggcccaggcacaaagcagttggcagagctctagcacatttattgggagagtaagcctgggaaagactaagggagtggtggcagggagaaaggctgtggggaatcagagcgggtgctcagttgggtcttgaaggagaagaggaggagggtgggaggtgggttgccgaggatatctggttgaagacttgggggtcaagacaaagggacttagggggatggggtctggttagagttggggagggggcctaggacatccgtgcagagtctggggaggttggggtgggagagtctgtacagtttggtgttgggtgttctagttggcctggtgtccaagagttggggcagtcgaaaaagggttccagagtctggtgtggctggctggggtttcacggcagaaaatgggctggagggggcagttgtagactgtctggttgcaggggaaggatcgggtcttgggaaccaggcctggatggtctggagtgggaggtctgtgcagtccaggacgtttggggggtggggggattgtgcctgactggcctggggttgggggagggctgtctacaccataatttggtgtcaaaatagggaagggatggaaatgtagtacccggatgtctttgtagaggactcagaaggaagtagaggaggggtcttaagtggggctatatgccaagaaagtgggtcggtggggctgagactgtcggctgagggttagggtagtgctggtagggtctggaagccggggagttgtcggtgtggggtcggaaagctggagggggtgtgagagcgagggtgtcagtggaagggtctatgttatcaaggcagtgtccaggatggaggtcagggcagaatccaggagtgggtgagaggacagtccttggcgcactcgggacatctggctgggcggagtcagatcggctttaatagagggagcctgaggaggctcccggggtgcgggcgcggcccagccccctcctacttggctgcggctggcggtggggcctgggccgacgctggtgcggcctggatggacaggacgccctcgggggacagcgcggacgtcacggcagccggatccacgccaggcggcaggcggtagcgacggtggaactcgcgcgcgacgaatccgtgctcatcctggaggggagggaggcttgagcggccccgcccctccggcccggcggcgagcgtacccgctccagccccgccccacgccgcggctcaccgggcgctcctcgtggcgcgcgtgcacctccacgtgttcgcccaccaccttgacagcaatttcctccggcgagaagtgcttcacgtctagcagcaccgaaaagtggccggggtccgtcggcacctgagcgcagcgggcgcgggcgggactgtcattgggctgggccaggctccaggacccacccagggagaccccacccccgtcggttccgtgccgcggctcactctggcctccggagttgagcagtcagctctcctactgggagtcacccaggacctcttcaccctgaacaacagggatacgccctccccctgtaatatctgggattgccctctcccccgcagtgatgaggctcccttcccctgcaaggtcaggaacctctgccctcccccggtgtcagcgaatccgaagtcatcgtgccccccagggcactgattccccagctccctcctcagagccccgggtcccttctccgccagccccgccaaactcgccaagatgcccctttccccgtctccagggtcctctgcctactctcccactcgagtcacgggacctcggcagctactggtagccttcccccacttcagagtggccgggaacccttcctcaagtcgcagggccctctcccctcctcttctggagatatcgggccaccgcacacagtctctcaactcttccccgagactaagaacattccttcccctcaggagtcactgcccgcctccttttccccagatttcccggatcaccagcctccttcagagtaagcaagactccccttagagtgacccaggccttccattctctggagagctgagagccccccaccccgccccccacctaagagcgacggggacctcccacccgctgcagtgtgcgggcctcagattcccattgactccggaagcccttcggagctgcggactctccaccccgcccaaggccaacgaacattctctcacatgttcccaccccaggctgccccagacccctggcaatggaagtggtcgagttcacccctccccaggcctggcacctgggcgacgggcagcgccacgctgggtgcgcgcaggtagtagggggcgagcgtggtggggcagagcgcagccagctcggcctccagcagcccctcgccgaagcgctggtcaaagaggcgtccgggcgccgaaagtccgggcaacggggccgaggcgcggcgcagccaagacggctgcacaggcacagggatctccatcctgctcctccgcgttgcagtgcccctgcgtgcgcagccgctcatttatagtgcgccctgtgccggcccctcggagggctgcccagggacactgggaccgtggccagacccggccattaggagagccttatttagaaacccaaacaatgacttggccatttattaagcgcctgctggatgcctggcaaatgctgtcaagaaggtgacatgaagattccccaatttccagaagaggaaactaaggctgaggagggggagccttgcgggtgtggggagcacagcgtggtgattggggcccaggacccaagaggcccacggaagagtttccagtccctttaatccactgcctcccccctggcagctctgaggatgacgcagatggaggtctttaggagcagattcctggagaatgcggtagccccgccaggatgtcaggaggacatagaacaggccctccctacccttatcctcagccagaccttgggcccagtcccccggcaggccgggcctaattctgtgcctctgactcagcctctggtgcgcagaggccagggggcgcgagcatgaacagttcaggctggccccccgggggccgcgcgctggggctggaaatagctcattttgatcccgctacctcggccaggagcccagacctggcaactgatgcaaccagctgctcctgcagcaagaaagaagttagatgaccgttgggacggactgattggcccaactgatggaggaatagcggttagagagagggcagagcgcgccccccccccaacccgccccactgcccctgcaacagaaagaatggtagttagaccggggtcgggacaggacttctgcagcaagaaggcgcttaaaaagcgggacttttaagcgagggtactttagatcacctcctaaccgcaagcccagcctcagatccttcccattggtgcacggtcttgccaattactgctacactcggcaggttctccaatcaaacacgccctgtcgggcaggcagtcgtcccagccaatcctgaaacacctccctccgggtacttctgtttcctctctttcattggtcgccttggaggccgctcgcctccggcgcgggcacagagaggggcggggctgatagggcgttgctaagcgacggagatgcgcgcggggcctgttgggtgaaggagcagagcggccggaagcgcggagggagccgcgggatggaccgcaggtgaggccgatcgctcttccagggactacaggaggctggggaggaccaacggcgagagcagcacagcctaggacgggctggatacggtctggagtcgctagggctccaccgcactggaactacaattcccaacatgctccacagccgttggcctctccagccgtagccgttagcatcccgggggtcccctaagagtcttatgttcctctctgagtgggccccaaggaattattgcctctaaaggtgtccaagaaaggcttgagatctgaatttcttcattttgaaatggcccccagacacgcctgggcgttgtctttgaactttctcgcggaggcggagcccagtggatcctggggcttgtagtccatctaccctttgccttcgtgtcccccaggaatgtatgggaaatgctcggtgatataatccagccgcggttctttctttctttctttttttttaagacagagtctctcgctctgttggcccagactggagtgcagtggcacaatcttggctactgcaacctctgcccccgggttaaagcaattctcatgcctcagcctcccaggtagctgggactacaggcacctgccaccgcgcctggctaattttttatatttttagtagagacggggtttcgccatgttagtaaggctggtctcgaacacctgacctcaagtgatccacccgcctcggtgtaatcccaaagtgctgggattacaggcgtgagccaccacgcccggcgagccgcgattcttaacctgaactccacttcgcaatcacctgggacgctgcggaaaagacacggaggcccagccccactaatagatattctgattctgttggtctggaatgggaaccgcgcgcctgtaacgttgaaaagcccctcctagactggatccagggttgagaaccaccggctgtcagttcctgagttgctccctgttaagactgctccaggggcgggctcccaggactcacccttccactgtcgatatcctgaatgtgcaacggtgcttcatggaaatgacagtccgtctcctccaggaatctatgggaattgtctggttctgccctcctctaatgtccccctccccagggctgcggcgaaaccacgtgctgcctgaaccccactttcctcttgcagcctgccagttttctccattcaagatagtccctttggagatgcgcccctgggtcgaagccactactggccatcccagagccagacctggtgtcccaaggtgaggacacccctcaaagagtgctgagtgccagcccagtagcaagagaatgacctttagagggtaggaagacatgtgatgagagatagggatgagagatttaagagacagccccttgtcccctccccacggccctgcccttgtccccctctctaccacctggattccccatctgagcccccatcacactaggttgttatcattacaggatgtgtttcctcccctctggactgagactttgtgtgtgtcctggttcccctgcagggatgacccatgagacctcacactttttcttcttgtgctcttccctgatcttagaccctgagcccatccaggtctcagagatccaggctcccacaagctcccaaggctctagccacaggtcccaactcccctgagctgtttgaggagtcctggccatccagttcagggaccccctccctgcccagcaccactgagggacagatgtgggcctccccagcacccaccctgattgacagcggggactccgtggtggccaagtaagtaccagcagccctgggggaaaaagaggctttgggttagagggagggagaaggcatgcagtaataatcatcatggccagagctgtttctgcagcactcttttaggaccaggcagtttatgtgtgttaagaactctggtgctagactgcctgagttcaaatcccagctctgtcatttaactctctgtatgatcttggcctcagtttctttatctctttttatttatttatttatttgtttagagacagggtctcgctctgttactcaggctggaggtcagtggtacaatcacagctcactataacctcaaactcctgggctcaagccgtcctcccacctcagcctcctgagttgctgggattacgatgcatgccaccacacccagcaaacctcccaccttggcctccaaaaagtgctgtgattacaggccagacgtaccatgcccagcctcagtttatttatctctaaattgggtgttttgttttgttttgtttttgtttttgtttttttgatggagtttcactcttgttgcccaagttggaatgcagtggcatgatctcggcttactgcaacctctcccttctgggttcaagtgattctcctgcctcagcctcccaagtagctgggattacaggtgcccaccaccacacctggttaattttgtgtatttttagtagagatggggtttcaccatgttggccaggctggtctcaaactcctgacctcaggtgatccacctgcctcagcctcccaaagttctgggattacaggtgtgagccactgccaggcctaaattgggcatattaatagtacacatcccctagggctgttttgagctttcagtgagttactatatataatgatctctagcagtgcttctcacatagtcaccacttagatttgtagaatacaggttcagctgctgtaacaaagagtcccaaattaattatggctgaaacaagatagaatttattcctccctcacctgcagtccaggcagaagccaccagggatgatgtggcaacccgtagttgaggtgtcagggacacaggttacttctgtcttgttgctgtccgaactctaggccgttgccctttccttcatggtgcaaaatggctttcaaccacatcagctttccaaaatcacatttcataccctgtttgtcaagaacttagtcacgtggtcacaaggctacaagggtacctggtaaatatagtccataggagactggctgtgtgcccagctaaaagttacattcctggctgggcacagtgactcattcctgtaatcccagcactttgggaagccaaagtggcaggatcccttaagcccaggagttcctgaccagcctgggcaacatggcaagaccccgtttctactaaaaatacaaaaattggcagggctgcagtggctcacgcctgtaattccagcactttgggaggccaaagtgggtggatcacctgagatcaggagtttgagaccagcctgaccaacatggtgaaactccgtctctaccaaattagccgggcgtggtggtgcatgcctgtaatcccagtgacttgggaggctgaggcagaagaatcacttgaaccaggaggcagaggttgcagtgagccaagatcacgccattgcactctaacctgggcaacaagagcaaaactccgtctcaaaaaataaactaattaattacaaataaataaataaataaaaatacaaaaagtagccgagtgtggtggcatgcacctgtgtcccagctacccaggaggctgaggagagaggatttcttgagcccaggagttgggggctgcagtgagctatgattgcaccactgccctccagcctgggtgacagagcgagaccctgtctcaaaaacagttatgtgactatataagaaagaaaagcagatattgagggatagctaccaggctctgccatggtgcttggtaaacgttggctgctataattattcttattattatttggctctcctcactccactcacctcctatcccctgatgttcacaggtatataaacaggttccgccaggctcagcccaccagtcgagaggagcgccagcctgcaggcccaaccccagctgacttttggtggctgcagtctgactctccagaccccagcagtcaaagtgcagcaggtacctctttcagtgccatccactactcccacccctaaacctttgctgatcaatgcccccagcagccactcctcctggccctcatacctcaactggggcttctcagcaggagccaacaaaccagaaggaagaccccatacagctgtccctactgcggtcaacgtgaccagtgcatcccatgctgtggctccccttcaggaaataaagcaggtgacatccccattcactccctcccttgggtgcctgaactgacaacaccagccctaggacagaattagaagatcaggagcagtggctcacacctgtaatcccagcactttgggaggccaaggtgagaggactgcttgaggccaggagttcaagaccagcttgggtgacatggtgagattctgcctctactaaaaaaaaaaaaaaaaagagagagagagagagaaccaggtgtggtggtatgtacctgtaatcccagctacttgagagcctgaggctggaggatggcttgagcctaggagttcaaggctgctgtgagctatgatcatgccactgcactccagcctgggcagtagagcaagaccctgtctctatttaaaaaaaaaaaaaaaaaaaaagcctgggcaccgtggctcatgcctataatcccagcactttggtaggctgaggcaggcagatcacgaggtcaggagttcaggaccagcctgaccaacatggtgaaaccccgtctctactaaaaatacaaaaattagccgggcgtggtggtacacacctgtaatcccagctactcaggagcctgaggcaggagaattgcttgaacccgggagacggaggttgcagtgagccaagatagcgccagcgcactccagcctggcgacagcaagactccatctcaaaaaaaaaaaaaaaagaattagagctgatccccatttcaaggaagctaaaacagaaaaggaggatttgctggctaatgtaattgagaaatccaaaagtagatgtttccagatatgcctggatccaggtgtttgaataatgttgggagagacccaactctctctgggctccatgcccccccttttttttttgatacagagtcttgctctgtcacccaggctggggtacagtggcgccatctcagctcactgcaacctccgcctctcggggtcaagcaattcttctgcctcagcctcctgagtagctgggactacaggtgcatgccaccacacccagctaatttttttgtatttttttagtagagatgggatttcaccgtgttgcccaggcttgtctcgaactcctgacctccggcaatccgcccacctcagcctcccaaagtgctaggattataggcgtgaaccaccaagcccggccttttttttttttttttgagacggagtcttgtgctgtcatccaggctggagtgcagtggcgcgatctcggctcactgcaaaccccgcctcccaggttcacgccattctcctgcctcagcctcccgagtagctgggactacaggtgcctgccaccacgcccggctaatttttttttgtatttttagtagagatggggtttcaccatgttagccaggatggtctccatctcctgaccttgtgatccacccacctcggcctcccaaagtgctaggattacaggcatgagccaccgcgcccggccttctttttttttttttttaattagatagggtcttactcttaggctggagtgcagtggcacaatcatggctcactgcagccttgaactctttgcaaccttcgcctcctgagtacctgggactacagcatgcgccaccatgcccagctaattttttggtttttttgtagagatgggatcttactttgttgtcgaggctggtctcgaagtcctgggctcaagcaatcttcctgcctcggcctcctaaagtgctgggattgcaggcgtgagccaccacgcccgcctctgtgcttctctttttttgggctcagtcccaggcgggctttcccctcacaatagccaggatggtccttggggtctctaggctcccatggtcctggctcagtgactccagtgggaagtgggggcttttcgaattgctccatcagaagccccagggctcactgtgattcactcatccttgagccaaccactgtgaaccagaggatagaatgctctgatgaagcagctctgatctgggaggtgggatccatcctcctccaaccatgatttgtccatgaaaggtgctaatccaccgggcgcggtggctcacgcctgtaatcccagcactttaggagactgaggtgggcggatcacctgaggtcgcgagtttgagaccagcctgaccaacatggagaagccctgtctctactaaaaatacaaaattagccgagcgtggtggcgcatgcctgtaatcccaggtacttgggaggctgaggcaggagaattgcttgaacccaggagatggaggttgctgtgagccgagatcgtgccattgcactccagcctgggcaacaagtgaaattcaatctcaaaaaaaaaaagaaaaaaaaaaaggtgctaatccaaaggggaaaactgggtctctcctccctgaggaggaggagcagatcctaagctggcatgtgaggttaccaagggcagtacaacctgcattccaggccctctgtttagaacccccttcccagcagcctttgggttggggctggcgtctgaccctgtcaccctgcagaacctccacacatggaactcatccctgctggacctggagacgctgagcctacagagcagagctgccaggctgctcaaacgcaggtgcccgcacccctgcccccatcacccttcctactgcggctccacgtggcccaggtctcgagacctccattgcctcactcctgccttctccctgcagcaaagcctccatctcctcctcctcctccctcagccccagcgatgccagcacttcctcattccccaccagctctgatggcctctctcccttctcggagaccttcatccctgactccagcaagggccttggccccagggcacccggtaagggctgagaggcaaagactgagggcagcctgggtgcaaatcccaactctgccactgaccagctatgggactttgggcctctctgggccttgtttctccagctgtaaaacagggataaggccagatgaggtgggtcaggcatggaggccgaggcgggcagattgcctgagctcaggagtttgagaccagcctggccaatgtggcgaaacccggtatctactaaaaatacaaaaattagccacgcgtggtacataatggtgcatagtggtgcatgcctgtagtcttagctactcagtaggctgaggcaggagaatcacttgaacctgggaggcggaggttgcagtgagccgagattgcgccattgcactccagcttgggcgacagagagagactccatctcaaaaataaataaataaatggtgccatcatagtccaattgctgggctcaagcaatcctataacctcagcctcctgagtagctgggactacaggcatgcaccactatgcccagctaattgtttttatttttttatttgttgagatgagggtctcactatgttgctcaggctgatctcaaactcctgggctcaagcgatccccccaccgccttcgcttcccaaagcactagggttataagaatgggccattcgttatgcccagctggttgttgcagttttgaatagggaagccagggaaggtgaccaagatctgatggatgtgagagaatgcaccgtgcgatacatgaaggaagagcattccaggcagagggaacgacaggtgtaaaaggcaaagccttcgccttttaccgggagagaggtgcagccaagggagggttcttaagtacgagaggcctggtctgactcaggtattcacaggctccctctggctgagagtagggaacagatttggaggagagtagagagaccagggaggctatttaagagtccaggttgggtgagtggggctggagcagggtgagggctgtagcgggtgggggagtgggtagattctggggaatatgtcttctggtcactgctgtaactccagtgtccagaacggctcaataaatatttgttgaatgaaaccaggcactgtgactcacgcctataatcccagcactttgggaggcccaggtgggatgatgatggcttgagcccaggagtttgagaccagcttgggcaacaaagcaagaccctgtctctacaaaaaaataaaaattacccccgtgtggtggcacacgccttttgtcccagctactcaggaggttaaggcaggaggatcgcctgagcccaggaggtcgagactgcagtgatcgcaccactgccctccagcctgggtgacagaacaagactatatatatataatgaacaaagacttgaatgatgacagatggagaagaccaggagtgctcgctcccctgactttgaccccttcccctcttcccaccccagagaggagctgggacagtatctggagagcctgtctgagtaaccccctgcacagttggagggcgtgtgtgcaggctgtcctggggttgctgatctccctggcccctgcctcaccctctcctctctacctccccctacagcatccccggcaccagcccaggcccagacccccacccctgctccagccccagcctcctcccaagcaccccttcggccagaggatgacattctgtaccagtggcggcagcggcggaagcttgaacaggctcagggaagcaagggtgacagagcttgggtgccgcctctgacccctgccctccgcacgttggtgagccgagggagggaggagcctggggggagctggaggaggggctgggtctgagggggactgaggaccctccaccctctctctctctgtctcagatctctcttatctgtctacagacctctcctgctccagtggagaccctcagttctctggggacccagcctaaccatgtcccactgtggagcagtgtggcccagcctggtccaccagaggccttctatgtggagaggcctccttttccctcagtgtcctctccacacatcttttgggcccccagctcccacgggttcttctgggccccacagtctgggccttgggtatcccttggggctgttcctcccacgcagcaggcctccaccctagcacatctgggctctaccctcgcgcccccggcttccctggcctccaccctcgaacccccggcctccaccccagctcccctggcctccacccttgcacccccagcctccaccccggctcccctggcctgtacccctgcacctccagcctccaccctcgcatccccagctgtcccccagggcctgcccatccctgacccaagcagctgtgcccagcctaagagcctggggcccaagtctcggaggagcagagcccctcgcccagaggctgccgagcaagtccctgcagctggccagggacctggccctcagctcaggggtgtcctgggccaggtagtggcagctcggctgttccctgacagcctggaggacacgcctcctcacttcgagggcccccctccacccaaggctggatctccgaaagtccaggccacacaaccccaaaccaaggtcactccccctccatctgaatcccagtgtcgggccaaggccgagtctctgaaagccaaggccttgccgcccgcagcggggtcagtgatacggaagagcgaagccactccttcccctggagcctgcctgcagcccgaggtcccactctctccagctgagcaggcaaccacagtcaaggcctcgccgccagccttccaggtggggtctccggaggccctggccccgcccccgcccgctgctgaccacgccccctcggaggccctgcttgcccagggccgccctgctgctgcaggctgcagaaggtgatgcccgcgccctcctggatgttggaggcaggccagccccctaagaggccggccccttggagctcattcttttctccccggcccagactccgacggcagcgagttccaggacgatcccgtgctgcaggtgctaagagcccatagggcagagctgagtcggcagaaaaggtgaccgaccctccatccccagagtctatgacactgggccccggagacctctgagacccggttaggcatccagccctcctcatcccctgtcccagcagtccgtccacagccccagattctaagcctgagcacataccccagcctctgctctcccggcctttctccagggaagcggatgcccgattatcgttcctgttggaccaggctgaagacctgggatcttggtcccctccagccgggtcgccccctaggtccccaaggaggctgctaagaagggaaggagattccctggaggccagaagactttgaattgtacagattctattttacccagtgaggctctttttttttttttcatacagttactggttatctgtgagaaaggggttgtttggaaaggccaaggggtcatgccaatttaaggaaatgccccccatcctccgctgccccatggctctgccctgccccccaccccttcctgaccacggaaacaagatctcctttctggttatatcttccttggggcagagggagtttcagacaagacttctggcaagactgggacccaccttatctggcttcactcaggagccctggctcaaatggaccaaaggactgccctccacggaggaagctactagggtcatcagagtgttggatgatggtcaggctatagcccacacatgcttgagcagcagcagcatctggtgcagctgacccctccctccttgaagcactttctctccctgcttccagcccttctctctgcacctctctggtcaggcctagtcactagcccagcatgtcaactttggcatgacccagggccatggcgttgacatctctatctgcacccacccataggtgctcttgtctagcttaatgactctaaaccccgtctctattctgataatcctcaaatttctgtctgtaacctagacctggccacgaaaccttgggctcctacctcattaccatttctacccaagggtttaaaagacatctcaaattccataggtcctaaatggagtttccaatctttccccctaggcgtgcctctccccagcttctttttttttttttttttggatggagtctagctctgtcacccaggctggagtgccatagtgtgatctcggctcactgcaagcttcgcctcccgggttcacgccattctcctgcctcagcctcccgagtagctgggactacaggtgcccgccaccacggtcggctaattttttttgtatttttagtagagacggggtttcactgtgttagccaggatggtcttggtctcctgacctcgtgatccacccgcctcggcctcccaaagtgctgggattgcaggcgtgagccaccgtgctgggccccccctccccaactttcttcggctctgtcctttgccgctcagaccaaaaaccttagagttgtctttgacttctgtctttcccttccacccacagttaaccaggaaatcctgccatctccgcctttattttattttattttttgagatggagtttcacccttgttgcccaggctgtagtacaatggcatgatctcggctcacggcaacctccacctcccgggttcaagcgattctcctgcctcagccttctgagtagctgggattacaggcacctgccaccacgcccagctaattttctttgtttgtttgtttgttttgagacagagtcttgctctgtcccccaggctggagggcagtggcacgatctcggctcactgcaacctctgccttgcaggttcaagctattcttctgcctcagcctccctagtagctgggactacaggcgtgtgccaccacgcctggctaatttttgtatttttagtagagacggggtttcaccatattggccaggctggtctcaaactcatgacctcgtgatcctcctgcctcagcctcccaaagcgctgggattacaggcatgagccatcatgcctggcaattttttgtatttttagtagagacgaggtttcaccatgttggccaggctggtctcgaactcctaacctcaggtgtcccacccacctcagcctcccaaagtgctaggattacagatgtgagccaccgcacctggcctccacctttaaaatctatccagaattcaactgcttctccccttctactgctcacacctcaatctaggctgtcatcacctcctctctggactgttggaaaacttaacggtttttataaacctgatattctttgacacacttgccatcaagaggcagagtctatgtcccttcatcttgaaactgggcccctcaacaaataaaatgcagaggaagtgatgcagcttaacttctaaagtgcagttagaaaagatgatttctcagctgggcatggtggctcacgcctgtaatcccagcactttgggaggctcaggtgggcagattacttgaggtcaggggttcaagaccagcctggccaacatggtgaaatgtctctactaaaaatacaaaaattggccaggcattggtggtgggtgcctgtaatcccagctactcaggaggctgaggcaagagaattgcttgaactcagaaggcagaggttgcagtggaaaaaaaaaaaaagataatttctctctctttctctctctctctgacacttgctttagaggctacattaaaaaaaaaaactagttgccatgctggggaggggtttgggttacacaggtgtatgcacttatgaaacttagtgaagtgtgtgaatttcattgtatgtaaagtttacctcaaaagaaaatattgaacgccagttaaagatacgcctgtaatctgacttctttgggaggccaaggcgggaggatcacttgaggccaggagtttgagactaccctgggcaacacagcaagacctgtctctacaaaaataaataagtaaataaatagccagatgtggtggcacacgatttgcagtcccattactaggggcggggaggggcgctgaggcaggaggtttacttgagcccaggagttcaaggctgtattgtagtgaactaagatcatgccactgcactccagcctgggctacagagctagaccctgtctttaaaaaaaagaaaagaaaaaaaaaagtatgtacactgaaatatttagggaacaataaaccaatgtcgacaatttattttgaaatgcatccagagatgagttggattgatggataaatagtgtaataggtagatgtgagataaagcaaatacagcaaagtgttcatggtaggatctaagtggcggatatgcgggtgtccactgtaaaatttttcaactttgctgtaatttagaaacttttcatggccgggcgcggtgactcatgcctgtaatcccagcactttgggaggccaaggcgggcggatcacgaggtcaggagatcgagaccatcctggctaacacggtgaaaccccgtctctactaaaaatacaaaaaattagccgggcgtggtggcgggcgcctgtagccccagctactcggaaggctgaggcaggagaatcacttgaacctgggaggcagagcttgcagtgagccgagattgcgccactgcactccagcctgggtgacagagcgagactccgtctcagaaaagaaacttttcataataaaatgatggagaatatatgattggggttgttttgatatctgcatttacaaaatggagggataagatggatttctagtaacttctgtatgtcacatggtaaatataatatttgttttcaacctttctttctttctttttttttttttttttttttgagatggagtcttgctctgtcacccaggctggagtgtagtggtgcaacctcggctcactgtaacctctgccttccaggttcaagtgattctccttcctcagctttccgagtagttgagattataggtgcatgccacctcacctggctaatttgtgtgtgtgtgtgtgtttttagtagagacagggtttcaccatgttggtctggctggtctcgaactcctgacctcatgatccacctgccccggcctcccaaagtgctgggattacaggtgtgaggcaccgcacccggcctgtttctaacctttctaagcaaaccatacatttaaatgaaatcagagtgggcacagtggcacaggcctgtaatctcagcactttgggaggccaaggcgagcagatcacttgaggtcacgagttagagaccagcctgggcaatatagtgaaactctgtctccactaaaaattagctgggcctggtggcgggtgcctgtagtcccaggtgctcaggaggctgaggcaggagaattgcttgaacatgggaggcggaggctgcagtgagttgagatggtgccactgcacttcagcctgggcaacagagtgagactccatctcaaaaacaaacaaactaacaaaaaaatgtaattgacaagaaaaatagctgtttagatataaggagaaataaaagatactatagtagcagaacctgatctagctgggtcacgggtggggtctagaagcattcctgaggaagttacacttaagctgagacaggtagaaattatctagttaacaaagggctgtcctaattactctagttggataaccgctcccaaaacttagtggcataaaacaattattttattatgctcatggattctgagagtcagaggtttggacagggctcatatggggacaatttttgtctcctccatgatgtctggggattcacctggaaagactcaaaggtgacttgatagacttgatggctgtggagtagaatcctccagaacttcttccgtggtcttctcccagtctgactgggactattgactaatgcctatacatagctccattggcctgggcttcctcaaagcatgtctgcttcagcatagtcacacttcgcatatgatgcaccatggttctacagctcattccagtggacgagaacattggtcaagaagctgcattgcctttcatcacatagccttagaaatcaccgtgtcacttccactgttttctattggttgaagctatcctagtcccacccagattcatagaaagcaatcatagagtccgcgtcttgataagaagagtgtcagagaatttgcagctgttttaaaatcactgcaggaccccattctccatgatgtgattattacacattgcatgcctgtatcaaaacatctcatgtgccccctcaatatatatacctaaatatacctgttatgtacccagaaaaattaaaaaataaaaaaaaaaatcactgcaggggttgatggggaaacactagacagaaggaatatcgtgtgggaaatccctgtgatgagagtgaggtcagcaaatttagtacataagtaactgcacattcacctctccctcagcactccctttcaccagcccttgcttaattattctccatagaatgaatcaccttctaatattttttttttttttcagacagagtcttgctctgtctcccaggctggagtgcagtggcaaaatctcggctgactgcaacctccgcctcctgggttcaagcaattctcctgtctcaggctcctgagtagctgggattacaggcacacgccaccacacctggctaattttaatatttgtatttttagtagagacggggtttcagcatattggccaggctggtctcgaactcctgaccttgtgatcctcccgcctcggcctcccaaagtgctggggttacaggcgtgagccactgtccccagctttttttttttttttttttttttttttttgagacagagtctcacttcaacacctaagctggagtgcagtggcgcgatctcggctcacagcaaactctgccacctgggttcaacccattgtcttgcctcagcctcccaggtagctgggattacaggcacgcccgccgccacacctggctaatttttgtatttttagtagagacggggtttctccatgctggccatgctggtgtcgaactcctgacctcaagtgatctgcccgcctcggcctcccaaagtgttgggattacaggcgtgagccaccacgcctggcctaatattctatattttgtttaatgttaattttgttcattgtcttctcccagtagcttttgagctccaatgtgggcagggtatattttctcctggtttggttgttgatgtatgtacaaattgattagagtttgagtgaatgaatgaatgaatgaatgaatgaacagaccaagaccctctgagatgagaatttgttgagggcatgactaaggagagaccctcctgtgaagggcgttattacagtgttatctgggcatgctcagtattagcaggctccattgggaatggctttatggggggcataagcatgatctggcatttccccctaagcattttcctagaaaaaaaaaatcaaggctggagattggcccgtaataagcagtagaaggggaaacaagaaaatgtccagtgggcaggggaggccaaatcgcagaaagcctcgggttacgtcctaggcaaggtatatgaggcaacgagaaacgtccatgggcggagcgtcctcggcattatgtgagcggggtcgggatcaggactgaaaaggtgagacttgggactgggactttgaaaagctgcttaaggaactgggcactgctctgaggccgtgggagaatccaattaagactatcaggggctggctggcgtggtggctcacgcctgtcatcccagcgctttgaaaggaggctgaggagggagtatctcttgagccccagagatcaagaccatcctgggtaacatagtgagacccccatgtctaaaaaaaattagccaggcgtggtagcgcacgcctgtagtcccagctacatgggaggtatcgcttgagcccaggaggttgaggctgcagtaagccacgattgcaggactgcgctccagcctgggcgacagagtgagaccctgtctcttaaagaaataaaaataaaaaagtcagaagaatggacactgggagtggacgaaaggtagggtccattgcttggtgttggaagtgtcggaagcaaagcataaagaacctgggggcttgtctcaggagggcgatgacagccaatgaaaagcagtcatgggcgtggcgctgtcaaacttcgaggggcgggaccgaggacacagagccggggcggagcccaaggtgaaaccaatgagaagcctccgggtgggcggggcatcggcctaaggccaagggcggagccaatgagaagcagcgccgcgttcccgctgccccccgcccccgtggggcgcgcgccggagccacgggcagccgttaggggcggggtctgcagccgcccgcgcgcggctcgcgccctcccctttgtgtcgccatggcggcggcagcggcgacgagaacggcgagcgaggggtcgagcgcggccggggcctgaggaggctacgcgaccatggtggtaagggtcccacgcggccgtcagcctgtccgtccggatgtcagtctgtccgtgcgcagccccgccccgcgcgccccgcccccggccccgcccgatcccgcggcctgtgcttcagccgtggtccctcccgtcctgcggccccatcccgggtcccagcccgtacctcgaccccgccccctaagcgcgcatccccgtcttccacgccctggatggggtgacagggacctagggcctgggctgggaggaggcggggctagtccaggaagggacccgcgccacccaagtggcccctgcaggggcctcctgaggctcctgggtccttccccagctcccatcccagcaccttcctcggcatccttctgccagccctcagccctccccggcggagccccctcctcctccccacagcccctttctcattcccgagccccaccccccacccgctccatccccagcctgacccttttcttctccttctccctcattttcaccctatcccagttcctctcaatcccccccgccccgcatcagtctgagcctttgcctcgtctctccagccactccttccttactccaccccaacaggccagcactgtacctcccttgatcctcgggtctgctccatctccttgtcctcatccccctcccccaccatttccctctcccaccatgctgctcccgctcattcatccattcattccctcacttagcagacattcactgagaccgcctctgtgcaggccccacgctccaggcacagagagagtcagctcccatcctgccttggggaaccttatgggctggagggggacagaccctgagggtgagaccctgagggtgactgggggttgcagggacatggagcagggagacgctacagcccagtgaatctgtctggcagctggttaatttattcatcagattttacccagtccctgctgcgcgcgactgggctggcactggggacccagaaaagaatcaggaacaatcatgtctgaacaccaactcaatgcccagctctatgctggggagctcagtctggggccctccttctgggaggccggtcatagtccaatgagagagatgaacttgtcaccaccagtgccatctcagagtgatcagagctgtgaagggagaagctctggtcaaggcatggaacctgggatgggggaacctcaggggatggagagagtccagaggagatgccaggtgcagcctgaagggtcagggagaacttcctggaggagggcacatgtgagttgggacctgaggggtgggagtgaggatgaatgtacccagggaaaggtggggcgagtgttccaggctgagggaacagcctttgcaaaggcctagaaggaaatgagaagagggtgctttttttggactcttagaagttcaagagctctgagagtgggggcaatgggaagagatgggactggagaggtaaacagaaatcagctcagggaagtctcgattatcagaccagagaattcagacttcgtcttgaagacaacagggagtcattgaaggcccaggatctatggagaaatagagccagatttgtgttttctgaaaacgatccaggctattgcggaaaagctggcaggaggggagaggctggaagcaggaaggctgatgagatgggagttgtgattgtctagacagtggtaggagatcactgtactctgcaggggctacggaagggttttcagcagggagagatgggaccagcatgctctccatcctgttgccccgcctcacgtctggcccctgcttctccagtcccccaccccagaccacacacgaagaagcagtcctgtcctcagcccagccctcacctcccccgacctgccatcctgcttcatgctcagggcggtgtgtggagcgcccggggctctggacccgcgctgccagataacaatgctctcgttgtctctttgctcccatctctgggggcctctgattctttctgctctacaggcacgcagcactgacagcctggatggcccaggggagggctcggtgcagcctctacccactgctggggggcccagtgtgaaggggaagcctgggaagaggtgagggtgagggaggaaagggctcagctaggagctggggagactcaaggagctgctggtgacgcatcccctgtctcccaggctctcagctcctcgaggccccttcccgcggctggctgactgcgcccatttccactacgagaacgttgactttggccacattcaggtatgggggctttgcatttgcacccaggagggaagacaatatcctacccaaccttgcaacgatatcaggtgctttgcttctgaaacttatccctgtgactggctgctgcacgcgtctgagcagtcagtagcaaaagttgcaggagccacagcagatggggagagctgctcattcattcatccatttgttcttttattcattcaacaacaacttttgttaggtatctgctctatgtcagggaccaggacatcaccaggccctgtcctcggggaggtccagaagggagtcacaaacccgtccctagatagtgccatccccaggaggtcaggactgggacaaaagtccacctgggccttgctttccctctgcagctcctgctgtctccagaccgtgaagggcccagcctctctggagagaatgagctggtgttcggggtgcaggtgacctgtcaggtgaggccatcccgcctctcatctagcctgagagaatggccactgtagtcctcagctcggtgtcatggggcccctgctcccttctgtccctctgctcccacagggccgttcctggccggttctccggagttacgatgactttcgttccctggatgcccacctccaccggtgcatatttgaccggaggttctcctgccttccggagcttcccccgccccccgagggtgccagggctgcccaggtaacctgcttgttgtctcagcccctgcctcatgagtgtgtcctcatccacagtgtgaaatcatcaaggcagcgggatagagaaatatttaaatactggtatggcccaagtcccaaccaatctgaatgaatggagaagccttagaaacgtagtaggcttctgctacatttagctttgctaagttttaggatcatggggagttccagggggtcccatgggagggtcaccatggtcatgccaaccagggtactcaagagcttggcccagcctgcttattcattcatatgcccatatctcagtacctaacagctgagcagcacccatgtgttcaggatgaacttcagcccagagacgagctagggcagtgtgggagggcagtgggctctctcacgtccactcacagaggcccactctgacaacctgcccccagatgctggtgccactgctgctgcagtacctggagacactgtcaggactggtggacagtaacctcaactgcgggcctgtgctcacctggatggaggtgggcctgggcagggggcttggagattccgagtgggtgagggggtgtctgaggggcgagaagcagcctcggtgtgtgtgtgggcatagaaaagaaaggagccagagtggaggaggcgttgatattttagtgtctgtgtgggcgcatgcctgtgagagaatgtgtgtgagcatgtgtgtgtgtgcacgtgtgtgtgttagcaggtgttcggctttaaggatacaagggtttaaatgtatatcagttagaaatgggttgggctgtaactcacagaacacctggctatgagtggcttaaaccagaggggttttttttcttttcttgagatggagttttactcttgttgcccaggctggagtgcagtggcatgatctcgcccaccacaacccctgcctcccaggttcaagtgattcttttgcctcagcctcctgagtagctgggattacaggcatgtgccaccacgcccggctaattttatattttcagtagagactgggtttctccatgttggtcagactggtctcaaactcctgacctcaggtgttccgcccacctcagcctcctaaagtgttgggattataggcatgagccactgtgcctggcctctggctaattaaaaaaaaatgttttgtagagacagagttttgctatgttgaccaggctggtcttgaactcctggggtcaagcaattctccaggctcaccctcccaaagtgctgggattacaggcgtgtgccaccacgcccagcacagagagattttagatggcaaccgtgtggcatctgctgtggaggatgaaggtgcagaggtggatggggaagccttcaggtggggaagcctttgggtgggagagtcctgggacatgtgaggggaaataaaggggtttttcttagaggtttccccacccgcagagggtgccagggctgcatccctacaaacaggaatctaggtgtttgaccaatagctctgagtgacaggggctcttgacgggggcgggcagtggcctcacccagcgcggaggagcttggtatgcctgcactaacaccgtcttctgacctgtccttgccacattccacctctatttcagctggacaatcacggccggcgactgctcctcagtgaggaggcgtcactcaatatccctgcagtggcggccgcccatgtgatcaaacggtatacagcccaggcgccagatgagctgtcctttgaggtgaggctgtggggaagcagattccagctgggctccccacaccccctgctccttctgacccttctcttcccacccgccctctcccaggtgggagacattgtctcggtgatcgacatgccacccacagaggatcggagctggtggcggggcaagcgaggcttccaggtgagtccagctgggcgcggacaggtggggctggggtacctgccaactggggtggcccagctactgaccctgaccttcctcaggtcgggttcttccccagtgagtgtgtggaactcttcacagagcggccaggtccgggcctgaaggcgggtaagtgccatggatggatgggaggtgtggggaggggtgggaaggggtggggcctcctgcgtcttttgcctcccactcatcccttccaccccatttttcgcctagcagatgccgatggccccccatgtggcatcccggctccccagggtatctcgtctctgacctcaggtaatagaaataggcggtcaggtcccagcccctaccccaccaggcccctggccatgctgaccccacaagacctgcctttgccctttgccccttgcccccacagctgtgccacggcctcgtgggaagctggccggcctgctccgcaccttcatgcgctcccgcccttctcggcagcggctgcggcagcggggaatcctgcgacagagggtgtttggctgcgatcttggcgagcacctcagcaactcaggccaggatggtgaggccggggcccacccaccccacccgtcacaccagggctgcggcccacccagccctgaccttgctttctcccagtgccccaggtgctgcgctgctgctccgagttcattgaggcccacggggtggtggatgggatctaccggctctcaggcgtgtcttccaacatccagaggcttcggtgagggcccttagccaaccctgtccttccacaggcactcacccagcacctccactccagccccgtgctgcatgctggggacacagttaccaggagtcaggagtggcaggatcaaggctggggtcagggacagctctcttgagagtagagttagcagtctaagcgaggactatcttcaccgagcacctgccacgtgccaggcactgttctaggcactggggacgcagcagtgagtgagacagccagaaacccctgccctcatagggcccatgggctagaggaagagacaaacaggggagggatagagttcaccagaagatgacaggtactatggaggaaaacagattggggtaaggaggatggcgacgaagagccaagagggaggcctgcagttttggatggcaagggcagagccacctcatgcgagggtctggaggaggggaggggcaggccatgcagagggagcagcagggcaaagggaacagcaacaggaggccatggccaaggagtccccgtgccagcgcaggcaaagccttcatgttagggttttggcttttactataagtgaagggggaaccgcaggagggctctgagccggggcggggtctagaggcggggaggagccaggcgagatctcggcctgcaggaggctgagaggggagtgcttgaagcctgcaggggggtggccaagagggaggcaggaggtggcaatgggtgggagattttaccacaggcagtggggccccaccagagaattgggagtagcagggtgctgggattttgtccacattttccagtgccctcttacagccaggagaatggcagctgcatggtaggagctgctcatgctctggagtcagacagtcttgggtagctgcaggcagaggcacctctgtctgagcctcagcatcctcctctgtaaatgcggcacccttctctttgccacacaggcttgctggggagttcagtaaggttctgcctctgaagagcccagtgtaggacctggggaagagggttccatccacctgcgggcacttgggggtaggggcaaggggagcatggccacgtgagcgagcccctctgacctggatcttcctcctccttgacacggtggtctcaggcacgagtttgacagtgagaggatcccggagctgtctggccctgcattcctgcaggacatccacagcgtgtcctccctctgcaagctctacttccgagagcttccgaaccctctgctcacctaccagctctatgggaagttcagtgtgagtaagggagctggcgggacggagggggccgggacgcctctggcccagacctcatcacacctgcccaccatctcaggaggccatgtcagtgcctggggaggaggagcgtctggtgcgggtgcacgatgtcatccagcagctgcccccaccacattacaggtaaaccaggaggggcagggcgggacttggtgggattccaagggggttgaggctcaggtgccccctctgctcccacccccaggaccctggagtacctgctgaggcacctggcccgcatggcgagacacagtgccaacaccagcatgcatgcccgcaacctggccattgtctgggcacccaacctgctacggtgagctgcttgctcgcctgcctgcccctcaggtctttccccaaaaccaccccaggaacccgcccagcttttcttttgtttattcatcgaatacgtgtctatcaaatacctcccatggacctggccccgtccctagcactggggacccagcactgagcatggccctgtcctcctgggactcatgttctcatggaggagatggaccatgaacatcaacaggaaaaatacagagtaaagtctgatggtgatgagtgctgaggaggagagaggaggagggaagggcagtgtgcagggtcagggcagtgtgaagtttttagcgagagtggcaagggaggctttggcaggtcttctgtggccagcagcagaataagcctggaggatttgatggtgaacgagacaggcatgatctctcccctgccggagttcacagtcttctgggggcacagatacataaacaagtaaaacaggtggtatgtcagaggacgggcgtaagatgtacggagaaaaataaacgagaaaggccaggggtacagagaagggagtgtacagttttgaataaagtgggtgaggaagactgcactaagaaggcaatatttgagtcaagacctgcagaggatgagggagggccccaggtgcgcacgtggggagtgacaggctgagggaacggcaggtgcagacatctgggcctgggccggtgcctggtgtgttggaggagctgcagggaggccggtgtggctggagctgagtgagtgaggggctgagggagaggagatgatgaggtcagagaggtgacggggaccagacagaggggtgactcacaggtcatgggtcacagtgaggactttgctcttgcctggagcgaggtgcagccagggcagggctctgagccaggcgggccctgatggaactcaggtggtctcaggctccctctggctgcaggtgggagcatactttagggtggggaccggaaggaggctctgggatgtccaggctgggggagatggaggctgggccagatggggggcagtggagggggtgacagattgattgtgggagttaaagaggggggctcagggcaaccccaaggtgtttggccagagccacaggaagaaccacactgagatggggaaggcaggaggggcgggtctgggggaaggttgagagcccagcgaggcgtgatcagtttgaggtcagaggtgttgaatagacagtcactgcctcccctggctcccctcattgccctgccagaacctgctggctgggctcaaggcacccagcctccctcccgctcctcccacccaggtccatggagctggagtcagtgggaatgggtggcgcggcggcgttccgggaagttcgggtgcagtcggtggtggtggagtttctgctcacccatgtggacgtcctgttcagcgacaccttcacctccgccggcctcgaccctgcaggtatgccctcccaccccctgaggtcctggctactgcccaccacgatcagggctgcagggggagggcaggtgggctcccagtcccgtccccaccccactgaagctgggcctccctccggctccttgaggatcccgccccggcctctccctccccgcgcccccctccttctcatttcagctcctccgctcaggattcccacctcttggcccggacgccgctcttccttcaccccttgtagctcctgggggcgcttggggccatgggtccacctgggaggaggtgggaggtccccagacttgaccccgccccggccccacccagactccccgccctgccccggaccccagcccagtcaggactcagcacgtcggagggccctctggcccgaggtaactgaagccagagccgctgccctcgctggctgccgggagctgcctcctcatcagctcgtcccgccccgccctcctcccacctgcctgctgcccgcctgctcccgcctgatccgccccggccccctgccttgccagcccgggtgggcatgctgcggggccggggcttgggctgtggcgcttggctttgcctgtggccttgggcggccccagagctgacagctgccccctttccacactccccaggccgctgcctgctccccaggcccaagtcccttgcgggcagctgcccctccacccgcctgctgacgctggaggaagcccaggcacgcacccagggccggctggggacgcccacggagcccacaactcccaaggccccggcctcacctgcggaaaggtgagtgggatgctgggggtggcgaggggcaggtggaggcctggttcctcagacggcctcctgtttctcccccaaaccgcaggaggaaaggggagagaggggagaagcagcggaagccagggggcagcagctggaagacgttctttgcactgggccggggccccagtgtccctcgaaagaagcccctgccctggctggggggcacccgtgccccaccgcagccttcaggtgagaggctgagccatgggctggtgggcagcgatggtcgctggagtgccctcctacctctccctctcctgcaggcagcagacccgacaccgtcacactgagatctgccaagagcgaggagtctctgtcatcgcaggccagcggggctggtgagcaaggcgggcaattggggggcgctacctgtgcccatgtggagccgggaggaattggggccctggtttggcctccaaattttatacttcacatttgggggccctggggcttttgaaaaatttaacctggcctttatgtacaatgagttggatacagtatcacctttggttcatcacacactgaacttaacttactcattggtccatgacgggccctttaaaagtctttattattcctgttgaacattttaaaataatatcatggacacccatgaacccagcagccagaactagagcagccccattccttctccccttcgagttcctccccactggaggcatcctctcaatttgcagactaccctgcccttgctttccaggtctgatcatacacaggtgtgtgtgtaaggatcatactgctcagttctagccattttggaaacttgatttaaagggcgttgtaagaaagggatgccgcactgtatggggagcttggctttttctccatcgctacctcacagcccgccgcgctgctgggtgctgctctccgacctctgcggggggctgcttatccaccccacccagccgtgcctctgggggctcttctgagccaccgcgccatcctcacactcctggggtactgccctcccacatacccaggagcccaggtgctgtcctgctggctcagcagctgtatgtgaatctgttggtctcgtgctcacagcctgtggggcagccacagggccttcgtgctttgggccggaagtgtcctcttcatggtctccactgtcaatctgaacagctcttcctggcttcacactactgtggccctctccaggaggcgcctcttcatgtcctttccccagctttctgtggggctgtgcgccctgttctcagggatggtctcactgaccccacccctccaggcctccagaggctgcacaggctgcggcgaccccactccagcagcgacgctttccctgtgggcccagcacctgctggctcctgcgagagcctgtcctcgtcctcctcctccgagtcctcctcctctgagtcctcctcttcctcctctgagtcctcagcagctgggctgggggcactctctgggtctccctcacaccgtacctcagcctggctagatgatggtgatgagctggacttcagcccaccccgctgcctggagggactccgggggctggactttgatcccttaaccttccgctgcagcagccccaccccaggggatcccgcacctcccgccagcccagcaccccccgcccctgcctctgccttcccacccagggtgaccccccaggccatctcgccccgggggcccaccagccccgcctcgcctgctgccctagacatctcagagcccctggctgtatcagtgccacccgctgtcctagaactgctgggggctgggggagcacctgcctcagccaccccaacaccagctctcagccccggccggagcctgcgcccccatctcatacccctgctgctgcgaggagccgaggccccgctgactgacgcctgccagcaggagatgtgcagcaagctccggggagcccagggcccactcggtgagtcctcagcctaccccacccctgtccccgccagctgtcactgactctgagggcctggccccagctgaacccctctccattcatttatataggtcctgatatggagtcaccactgccaccccctcccctgtctctcctgcgccctgggggtgccccacccccgccccctaagaacccagcacgcctcatggccctggccctggctgagcgggctcagcaggtggccgagcaacagagccagcaggagtgtgggggcaccccacctgcttcccaatcccccttccaccgctcgctgtctctggaggtgggcggggagcccctggggacctcagggagtgggccacctcccaactccctagcacacccgggtgcctgggtcccgggacccccaccctacttaccaaggcaacaaagtgatgggagcctgctgaggagccagcggcccatggggacctcaaggaggggactccgaggccctgcccaggtcagtgcccagctcagggcaggtggcgggggcagggatgcgccagaggcagcagcccagtccccatgttctgtcccctcacaggttcctacccccggcttcttctccccagcccccagggagtgcctgccacccttcctcggggtccccaagccaggcttgtaccccctgggccccccatccttccagcccagttccccagccccagtctggaggagctctctgggcccccctgcaccactcgacaggggagagaacctgtactatgagatcggggcaagtgaggggtccccctattctggccccacccgctcctggagtccctttcgctccatgccccccgacaggctcaatgcctcctacggcatgcttggccaatcacccccactccacaggtcccccgacttcctgctcagctacccgccagccccctcctgctttccccctgaccaccttggctactcagccccccagcaccctgctcggcgccctacaccgcctgagcccctctacgtcaacctagctctagggcccaggggtccctcacctgcctcttcctcctcctcttcccctcctgcccacccccgaagccgttcagatcccggtcccccagtcccccgccttccccagaaacaacgggcaccctggggaccccgtacccctcatagggtgccgggtccctggggccctcctgagcctctcctgctctacagggcagccccgccagcctacggaagggggggcgagctccaccgagggtccttgtacagaaatggagggcaaagaggggagggggctggtcccccacccccttaccccactcccagctggtccctccactctgagggccagacccgaagctactgctgagcaccagctgggaggggccgtccttccttcccttcaccctcactggatcttggcccaaccaaatcccttgttttgtattttcttgaaccccgaccactaccccaggtttctaactttgtaacttgcttctgatgtgggtccctaacctataatctcagcttccctaccctggactgaagggtctgcccatccccccaccaccctccatcctgggggccctcgcacaaatctggggtgggaggggctaggctgaccccatcctcctctccctccaggagcccccagcatgtcctgacctgtgcacggggatggggggacaactcctacccttctttccccacatgccccactaaaccatctgacaacattaatgaataaaatggtgaaaatgtggctgctgaagtcgttctggggccaaactcagtgagtgaagacagacagagggggcactttatcattctatttccttttggggaggcaccaaggcaggagttactcctgggagcctctgagaggtggtatctgcagagaggggaaccatgggcaccctgggagtctaggtcaggagtggggctcaggctgggcttttctccaagctgacatcctttttgtagctctgctatgatctcctccagcaggtccatcctggggagcagtgaggcacaggtagacctagggttacctcagggataaagacctagggttacctggggtcctcccatccaaggcctcgggtctcacttctgcaggctggagaagagacctcctctagtcagctcagtaccgggtgcctgcaggagagaaggctggagctgccacctggtagccatggtgctccagcgggcctgggagggcagatggggcacaggctgagctcggggtcctctgcttagcctgccctcgtggccttccctgccagcagcctcccagtgtgtgggaagcctccctgtgggtcagcaggctggggatgggctcacagggctggggctccagcagaataaccctgtgtgtgcgccgcagcagcccctgcagggctggaatcttggctgagagcttcctcaaactgttccgcagagctctgggtccccagcagggaggctgagtcctagaggctggagttggagtgcagggaagggccctgggggaagcagggttggttaagggtcataggtgagtgaggggacagttgggcgaccctaaagttccctggtcaaaggagaggcagccagggaacttcgggttggtgactcctggagggcgggcggagggggtcacaggttagcagtgggacagttgtgcagggctctgggggtatctgtactgttgagctgggctccaggcagcagtgcaggctgaccctggctgtggggctgtggccagacccagggctgggtcctgggctgggcccagagctgctgcctagagtcaagctgctgcccaagttccaggctgcaccccttgggatcctgctgtggtctctgacctcaggagtctcaggcctgcagagaaggatggcagagagctggcatgggttgcccaggtgtcccacagctcccttggtcccccacagccccgtcctggctcctacctggcatgggatggggcctggggacatcacaggggccacaggcctgggtgtggtcttggctctgtgagccacttgatgtacagtttctctgtggggacagaccagttggtcagcacctgccagcatcccttccttgccctctaacttggtggggaaccctggggtgcaggggatagcgtggtccactccattggggagctcacctcaggagccacgtcctgtggaccggaggctgggtgtggggacacaggcttgcctggggtcccatggccaccacccaccccctgctgacctgccctgtacctgggccggggcctcccgcagtaggtatcgggtactctgcaggctgccccagcggtcagcaggtgctaggcctagcccagctcgaatcagggcctggtagggtgctggcacccggggctccagggccggactctcccctgcctccagcttggccttcacctcaggtccccctctcccagcccagggcagctctcctgccaggaagcacagttagggacccaagcgggagggtgccttcatggggtggggcgcagccactcactcaccagtgaagacctcctggatcaggatgcagaagctgtagaggtctgaggtggtggtgggcatgtcaccgcagatcagctgaagtggcagccatgggtgtagttcagggggcgggggaagccctgggcctgggcctccccaggggtagcccttctgctgcctgtggagcccaagggccctggtgagccgacggctgctggacagggacctgcacccgccaccagacaggaaaactgagaccccaggtcacacagcccagcagtggtagggccagcacctagctcctatgccactcacagtgcccctctccacccccacctcctccctggggtctacaagacaccactgcccatggccacggaggctggagaacagggaggaggggagcgtgcaggcccgagtcaaggggcagcaggcagggcaggcactcacctgggccgcagccagcgctggcgtaggaggcgcctgtgctccaggtggcccactttagccaggcctggctgcaccagctacacggtgtgagagctgaagccactgtgagctcgccagtgggcctgcaggaacagcagggcctttagcacctgctgcagcagggggccggggcggcaggcccagcacagtcccaggtgcctcctcacttggtctcggtgggtgcagcaccccctgcagggagcccagccacacaggctcaaagagaaggcacagccccgacagatctgcagagggactcagtgccatcagcagcaacaggccagggtggtgcagcttgctgggcaggaggacagcaggccactcacgagcaggccccagccacacagggtgggagatgctcctgggcccagactgcccaccacgtgccagggcaggcaatctgcacctgccatcagacagaggaaagactgatcccaggtcacgcagcccagcagtgggagggccagcacccaccgcctacctcatcctggtgccttccacacccccacctcctctcaggcctacagggcattgcacacacaactggtacccacccactttccagtggggggatcgccccagcagaagggctccatgccgggtgctggcccagaagtgaagattctggccatgactacggccacacacccttgtcttccgtgggagggccaacaggaggcggggctgggggctggcacaggtacctgcagtgctgaaggtcagccagtagcacatctgtctgggttccaggggccttcggctgctgcacagtcattttgtgacccatccacaggaggctggagaataggggcggggcagtacaggcctgagacgagggggctttccctgggaggggagcaggagagctggcaagggcacagcggggctctcacttggccatgagggtggggagctgctctcataggtgcagtcaggctctccctgggctgccagcagctccttggggtccacaagggggatgcccgttaccagccccggtggccacaggctactcagctagggacaggcaggatcatgaggcacgaagaagacaggggtggttcccactcctacagccactcctgcttacctgaccaaaccccaaggccgggacttgggaggctctcctgatctgtgctagcctcagcatcctggggtgggggcaggccgagggtaagtctggggtggctgggaatggttgggcgggtgggcttcaggatgtggacggttacctgtctgcctgcatcagcctcagggaggacagggagccaggcgggctgttcccaaatctggcctgcaactggtccagagatgccatgggtggcaactcaccgtcatgcacgaacgctgatatgtgggcccggcagagctgcaacaactccagcaactggaggagggcacgtagggtgaggcctgatgggtgccggccctgatccctcactcccaccagggccactgctcacctcccagttctgcttggccccaccctgctcagcccagtcttgtggtgtgcgaccccgctggtcatgcagttgcaagtcaccccctgcctgcagcaggggcaccatcactaaagaaggcgcctgcaggcacgggggtgctgccatccaggcagcggttagagcagaacaacgcggtgggagtcgattagggaagggactgaacagggacaaaaaggggcaggatgggggccctgggggatgggaggagtcaccatgtcatgggaggtgaatatgaggatgggaggggtcacatgagggcaggatggggtctttagggaatggaggatcactacgagcatggaggcactgggagaatgggaacagtcactggggaatgagaaggggttaattgagagaataaggagggttactggggggacaggagggtcaccagggaatggaagaggcatctcgagggagagatgcctcaggggaagagagccctagctctcaggctttctggggctcaaacttgggcccctggggatggggggcatcactggctggccagccactggttgggcttggcaccaaaggccagcaggagctgcatggcagagccgtggcccagcagcgccgagaggaagagcgctgtctgcccctcagagttctccccgtccacctggacacctaaggggcaggcaggcttaggacgccccaggcccatactcctgggttggaggcctgagggccgctaggcaaacacccttgccaattcccatcctccacagcccctccatgactggatgactatggaccccaggttccatctctgtgtcctggaacccctgccctccagctgctgaggaccatgcctcgcaatccacctcaacacagtgctccccaaatcattaagtccacagagttgaaacaaggggtgacatctgcctgctgtgcaaacatctatcccccaacccagggggatcaaaatcacacaaaggtccccatgggccaggaggaagtggatttcaggggactttgacttccaggagccttgcgcactggccgggacaggcggactccacccagctgtgactcagtgtggtacacacaggtcccatgaggccagcactcagcaattcaagtaaagcaaactctggattttatcagatctctcaaattttatttattttaatttttaattttttgtagagatggggtctcattatattgcccaggctggtcttggactcctgggctcaagcagttctcctgccttggtttcccaaagtactgagattacaggcatgagccaccatgcatggtctcaattttatttttgaagcctgcatctaagggctcaatccagttggcaaccccctccatgtccttacctccaggcctccgccaatcccctccccaaccatcttccagctcagctccccctcccaaccactcactcctgccccaagccctgggtctccaaacccgtcattccccagttcctcttcctccagcccctaccccaggtagagcaaatgcatggcatccttgtccttgcactcctgtgtccttggcagacacggctaattattcatgcactgggcccaacccagcgtggtctctgccacaaaacccctccaaatgtggaccttcaggaatctctgaataccagatttgcggcattgcatttgactcattagctcactatcttttacaacagcatcttaactgcctttctgcactcatcctgccccacagaggcctttttttttttttttttgagacagagtctcaatctgttgcccaggctggagtgcaatggcgcaatttcggctcgctgcaacctccgcctcccaggttcaagtgattctcctgcctcagcctcccaagtagctgggattacaggcgtgtgccactatgccaggctaatttttttttattttagtagattaggggttttgccatgttggccaggctggtcttgaactcctgacctcaggtgatctgcccacctcggcctcccaaagtgttgggattacaggcatgagccactgtgcccggcctttttttttttattttaaagacagagtgttgccaggcatggtggctcacgtctgtaatcccagcactttgggaggctgaggtgggcagatcacctgaggttgggagttcaagaccagcctgatcaacatggagaaaccttgtctctactaaaactacaaaaactagccgggtctggtggcacatgcctataatcccagctacttgggaggctgaagcaggagaatcacttgaacccaggaggcggaggttgcggtgagcagagatcatgccactgcactccagcgtgggcaacaagagtgaaactccgtctcaaataaataaataaataaataaaataaaataaagacggagtctcactgtgtcacccaggctggagtacagtggtgcgatcacagctcactgcagccttgacctcctgggctaaagtgatcctcccacctcagcctcctgagcagctaggactacagcacactccacagcacccggcccgaggtctcttcttaaaacacaaatcacttttaaggactagataatcttatatgagttgttccaaagaaaagaaaaatagaaaaagaaggcaaggctcattttatgaggctagcaggaccttaattccaaaactagatgaaagtttccagaaacagaaagtaagattatatatcaattgcatatatatgcaaaaactttaaataaaatagaatagatttatccccataaagcaaggatgattcaacataagaaaatctatcagctgggtgtggtggctcatgcctgtaatcccaacactttgggaggctgaggcaggtggatcacctgaggtcaagagttcgaaaccccttctctactgaaaattcaaaaaactagccaggtgtagtggtatgcgcctgtaatcccagctactcaggaggctgggacaggcgaatcgcttgaatctgggaggtagaggttgcagtgagcagagattgcaccattgcactccagcccgggtaacaagagtgaaactctgtctcaaaacaaaaaaacaattaaaactagtaagcaagttcagaaagtggcctgaaacacaaccaactttacaaaaatcaaaacagaaattgtacattgttaatttaatgggttattgttttgagacagggtctcactctgttgcccaggctggagtgcagtggcctgatcaaggctcagtgcagccttgaccttttgggctcaagcaatcctccctgctcagcctcccaagtagctgggactacaggcatatgatgccaccactccctggtaatttttttaaaatagagatagggtcttgctatgttgcccaggctggtctcaaactcctggactcaagcaatcctcctgtctcggcttcccaaagtgctgggattataggtgtgagccatgtggaacaggttgcccagcccaatttaatgttaattatgttaatttcctgcttacaatgccaacagtttcctatcacacacacaaaatccaacaaaactcacactcctttagaggcccttaactgtgtggacttgtggccacttcagcctcacgtctctccaagtcctgctgctactcatacatgggcagttcattttgacttcagagcgtttgcacagcctcttccatcactccccacttctttttttttttcttttgagacggggtctcgctctgttgcccaggctggagtgcaatggcacaatctcagctcactgcaacctctgtcttccgggttcaaatgattctcctgcctcagcctcccaagtagttgggattacaggcacatgccaccatgcctggctgatttttgtagttttagtagagacgaggtttcaccatgatggctaggctggtctcaaactcctgacctcaagtgatccgcctgcctcggcctcccaaactgctgggattacaggcatgagccattgcaccccaccatctctccccacttcatttcaccttttttgcgtggctgactcttatactgtaagactcaagcatcctccacctgaaaggccatactgtctagggtctcatcctcatcccactgcatttcattcccaatggtccaagggtcatgttcacccttaaagccccatcagggaccacagagctcgggacacagtcggtgttcggtaccactgctgactggccaactgaagccacaccctccatacagctccttgatcctgccgccacagatgtacctgcggccaggccctcacctctccgcaggagcctggccgggccccatcctgggcccccagccacagccaggtggtgcagacggcccacctgggtgtctagatccctcttggagcccagctccactgggaagcgcgaaagggctgcgagggcatctgtgggctgcggctcagtcggctcctgggcagggatccgctaggggggtctcatcagggaagggggatgtgaaggactggaactttgggcacaacaaaacaatgaagacagagctggctgggggtcctgggggcgcagtctagacgggaacgggatttaggaggggtctgatgggaagggaggtggctgaatgagaaaagggggtggctctgggagggcgacacaccagaaggtctggggtcgcagggaggctgagagctgagggggatctaaggcaatcgggagtctgggagggggcttagggctggggtcgggcgtgccagggtggcagaagggctgcgaggataggatccgagcttgggaaaggagtcggagggctcaggaggaggctctgaaggctgcggtgggaggatgaggcgcctgtggtttaggatctgagaggcggtgagaggggtcatggggaggctctagggacagcgtctgtggggtccgtggggtggatggggtctgagggcagcgggcgcgctctgaaggaggagagggcgctgatggcaggatctgccgactgtgcgggggtccgcgggtgggacgcgtggactaaggactagggaagtgtctgtgtgttgggggtgggggctacaggctggggaagggggctctgaggacagtgtctggggctggggaaggggtcagtggaatggggaaagggttcgctaaaggggcgggcaggggtgtggtctgagggccgcggaagagaaggacagggtgggaggggcctgagggctgggggaagggtctgagggtgatctgagggcccagaaagctctgggaaagttctgggcccacaccccagtcctggtggctttgcactcaccgttgggctagatagtggtcgccacctgactgccacatgatccggccggctgtatgagcgggaatccgaggtgcttgagcaccagtggcctcccgcagcgcctgcgcagtagcatccccttccccaacacagccccagccactcagcctgggccccacagccctgaccagtcggggctgtcactgtctgaggacggggctgtctacccacaccggactaagccctgtaaggcagggccttgggtcgttcttgtcactgttgtgttcacagcgttgttcaccccagaacctagctcaaaagaggcctcattcagtgcttttattctcactctgtcgcccaggctggcgtgcagtggcgcgatctcggctcactgcaacctgcatctcccaggttcaagcaattctccttcttcagccttccgagtagctgggattacaggcgcacgccaccatgcccggctcatttttgtatttttagtagacacggggtttcaccatgttggccaggctggtctcaatctcctgacttctgcccgcctcggcctcccaaagtgctgggattacaggcatgagccactgcacctggcgtttttctcagacaggatctcactctgttgcccgggctggtgtgcagtggcaagatcatagctcactccagcctccacctccagggctcaagccaacctcctgcctcagcctcccaagtagctgggactacaagcacaggccacccaccacacctagctaatttttttttttttttttaagatggagtcctgctctgtcgccaggctggagtgcagtggcacgatcttggctcactgcaacctccatctcccaggttcaagtgattctcctgcctcagcctcccaagtagctgggattacaggcgagtgccaccacgcctggctaatttttgtatttttagtaaagacagggtttcaccatgttgggcaggatggtttcgatctcttgacctcgtgatccgccggcctcagcctcccaaagtgctgggattacaggtgtgagccacagcacctggctagctaatttctttctttcttttttttttttttttttttttgagagataatggggtttcactatgttgcccaggctggtctcaaactcctgacctcaagcaatccacctgccttggtctcccaaagtgctgggattacaggcatgagtcactgcacctagtttcattcaatgcttattaactgagagaatggcttggctctttcttctgtccctccctcgccaagtggcctgggccgagccccttgacttcagtgccttggtgtctgctccccatgtgtgcccttcctttaggcatcccctgggatgaagaaagttctgcatcagtcactggccagacccaacccaggatggtctgcctcagaggtgagggaggcttccttagtcctccgtcaatgccctggctatgctcaatgggtgtctaacgatcttttttttttttttcttttctttttttttttttttgagactgagtctcactctgttgcccaggctggagtgcagtggcgtgatctcagctcactgcaagctctgcctcctggattcatgccattctcttgcctcagcctcccgagtagctgggactacaggcgcctgccaccacgcccggctattttttgtatttttagcagagacggggtttcaccatgttagctaggatggtctcgatctcctgacctcgttatccacacgcctcggcctcccaaactgctgggattacaggcgtgagccaccgtgcccggcctctttttcttttcttttctttttttttttttaaacacagtctcttgctgtcacccagactggagagcagtggtgcagtcataggtcactgcagcctcaaacccctgggctcaagtgatcctcctgcctcagcctcccgagctgggaccacaggcacgcaccaccatgccctactgatttaattttttgtagagaaagaatattgctatgttgcccaggctggtcttgaactcctagactgaagcacgcctcccacctcggcctcccaaagcgctgggagtataggcgagagctaccactcccagcctaacgatctctcttgaactgcaaaacccctagcttgggctggctgaggtcaagatgagcccttccccaaggaggcggcgtcagtgcaggacagcagcttaggcagcacctaaggacttttattgaccacatgaccccct

SEQ ID NO: 22655 - DNA, 42667 bp, Homo Sapiens
gatccacccgcctcggcctcccaaagtgctgggattacaggcgtgagccaccgcgctcggcctaatttttatattttttgtagagatggagtctcactctgtctcccaggctggtctcgaactcctgagttcaagcagttctcccgcctcagcctctgagtgttgggattacaggtgtgaccaccgcgccgagccccactccctttttaaaccaatgcacagggagcatctactatgtgcgaggcaccctccattttacagatggggaaactgagttccaagcagcttttgccaggagtgggagcgcaccgtccctgcccagtctctccagttgggcgttccgagaccacctatgtagggtattcggctagcgctcaattaaaccgaaacaccgtcgcagcgaccacaggtgcagaccaccaagtccacaccgccagccgcccgggcgtccccaattagcagttggggcgggaccaagtcctcgagctgccgccgcagcggcggttgaaagccccaccccctgcgcgtgcgcggtgcgcgtcccgtcttcctgctgggcaccaggcgcccgcgaagagcgcgcgcgcttccgccggcgtcgggctcgcgcacgcgcacggcgacggcggcggtggcggcagttcctgctctaggctgcgagcggctggcggcttcgaggggagctgaggcgcggaggggctcggcggcagcggcggcggctcggcactgttacctctcggtccggctggcgccggggcgcgcggtttggtcctttccgggcgcgcgggggcgacagcggcagcgacccgaggcctgcggcctaggcctcagcgcggcggcgggctcgagtgcagcgcggaaccggcccgagggccctacccggaggcaccatgagcgtggaggcgtacgggcccagctcgcagactctcactttcctggacacggaggaggccgagctgcttggcgccgacacacagggctccgagttcgagttcaccgactttactcttcctagccagacgcagacgccccccggcggccccggcggcccgggcggtggcggcgcgggaggcccgggcggcgcgggcgcgggcgctgcggcgggacagctcgacgcgcaggtgagcggcacatggcggtgccggaagcccgggcccggcctcggcgcctgagacctgccccgaactcgcctcgggcccggcctgtgtttggccggagtcccccatcgcggccgggcctggggcgatctgccccgggtcccctactctggctcggcctgagcttacctgccccaggtcctgcaatctgcccgggcctggcctgatctgccccgggtcccccgctccggccgcgacctggctgagttccttcggcccccaactcctgggccgggcagacttgcctcgagtcctccacttcgttcgggaccgagctaacctgaccctgttcctttacgccagctgggtttgctccccctcctgggcccgggctgacctgccttgtgtcccacaatcagtctggcctggagtaacctgccccctgacttatctgagttcttccattccatccgggctagggtgacctgccctggtccctctttcgcaggtctcggtattctgcctcgagttctcctacgacctgggccgggtcttgctcaggccggagcttgagtgacttccctcagtccctttccgggagtatccagggtgacctgccctaatcctgtctctggcctggtccgggggtcctgcccggtctccccattggtgggtctggccgcctgtcccacctcccatctgtggtcgcagccatctgggcaccccacctttcacagtcacggagcgtaggttcgactttccccatgcataggggcgctggccagcggaaggttgaggcagagaagaatttttgcctcccatggaggagcacatattggctggctattaagatcattcaggaagcaggttgtattttgttttttcttgcatcgcctgttgctgaaaccgacctgttacataacttcacaactcttgccttggaaaagttgggtttgagttttgttcttccaataagacagcaataatggctttacataaacgagtctgccacgttggaaacttatttttaatgatgtggatgtttagagaaggttacttaggtattttaaatgggggcttgggttgggagaagtatcgggcatgcatttcctggtcctgggcgctgcttgcctggggtgggagaggggctgggggggtggcgcgtgttgcaccggggtcctggggaatgtcctcatcaccctctggatttcaggttgctttcaccttaggcttgctttgtgcctgacctctcgctcaggtttgttttcctgaatgctccgacaggaagaagctccgaggcttaccttggcacaggtgtcccttggcatatgctggtgtttcagaactgggggaaccactccttgctcatccagagtgagctcagaccctgtccttgcatggggggcttacgtggtagtcgattgagtcactctcgtgggtagaccacccacttgggctttcttttagcccctaatggaagcaaaaaacatttgactcattctaaccccatattccttaaaatagaaggtggggtgtgaggagaacaggtgtgcacgtatgggtgtttttttcagttttgtttacattttgcgaagggagggagggagagaggagagttctcctgaagaagggagtctgagctgcggaggccccacctccttgtagttttcatgccctgtagacctttctgcttccgcagctgtgaaatgggggtggcagttagatttttattccttttaaacataaaggaaacctagatccatgtgtgagtcgactgtatacgctgtctgtaatctgacgtccagcctgtcggggagactcggtaaagatctctgtggagcagtgagccatgagcgtgacagcgcggatcggggggttggctgggtgtgaaaggtaatcattttcttgtgaatccttttaactgtagcgagcataaaacagcaaacctggggcagcctttagttctgcttttgtttctggcattccgtttgggattaattgtggggcatgtccttctctttcagttgaaacaattgattttttttcctgcacctgaacacactgggctgtacaaaaggagagcattaaaacgctcccctggaggtaaacattgcagttgagctcactagaattctgacgacatcagagggtttgtcctgtgctacttgtaattgacccagatgccccacccacctgttacctgtaatttggatttgtttgtggggaatgggagtggtacccctttgcatcacaaggggaagaacggaatttgggggcaaggaagtctatgaatatcattcaagggaaagcggaagaaagttatctcttgtgtgaattgaaggcagtgtctgctaagatatttgggaagactttccctgtttgtcctcaggagttggccgtgtaaccagctgttaagttgggggctcctggaaactctcattctgcttttttaatttttattttactggggaagtggctatcagctgtcaagtgccctgcagtcacttttgcttagcggctttattgaaatagaattcacttgccacaacatacaatttacccatataaagtgtacagttcggcggcttttatttagtatattcagagttgtgcagccattaccacagtaaactttagaacatttttgtcaccccagagataaaccctgcaccccttagcccatccgtcctacctccacagcccctggcaaccactcacctgctttctgtctcaagatgtgcctgttctgggcatttcacatcaacggaatcatatcatatatggtgttttgtgtctggctcctttcactctgcgtgatgtgtgagaagtagctacaaggtgagcttcgtagctgttccctggccgagcattcaggaaaatgaacctgatcgaggttcatccacgctgtggtatgtgtcatcatttcattccttttttttttttgagacagagtctcgctctgttgcccaggctggggtgcagtggcgtgatcttggctcactgcaacctgtgcctcccaggttcaagcgattctcctgcctcagcctccccagtagctgggattacaggtgcacaccaccatgccccggctaatttttgtatttttagtagagacggggtttcaccatgttggccagatggtcttgatttcctgaccatgtggtccacttgcctcggcctcccaaagtgctgggattacaagcatgagccaccgcacctggccagcatttcattcctttttaaggctgagtaatattccatgggtggaatggtccagatggatggaccatgttttgtttatctcgtcatctgttgatggacatttgggttgtttccacctcttggcttttgtgaatagcactgctgtggccatgagtgtacaggtttctgcgtggatgtgtttatagacctgctgggccgcgtagtaaccttgggtttaatggtttcagtaactgcaagactgttttccagtgtgtagccactttccataccaaccctacctgaactggttttgcgcagttggttttcccttaatgtgtgttgaaagacagtgtgtccccaccgggatgggaaagtggcagcaggggtgactccctgcactcagagctggttcagataacactccttttcttgtttatgaaatgaaactgatatttatcaaagcccttgagatcctgggatgaaaagcgctgacacagtattgccaagtgtccttaagatacagggacagttttcgagcatctgaccttttcctgggcccttctctgctgccacttctcctgctcccaggacagtgaaggtaatttcagaagtcctttgcataatagctggtgttacaagccttttggtctgcctggttggaatatttcctcttgactgtagcttctgccctggatcctccaaacgggaactagagtgaaactcttaagagttggaaatactgctcagtattaagaaggaacaaactattgatacctgcaacaacatggatgtgtctcataataattacttttttgtatgtgtcattcatcatatgatttaattcataaaaaaattctagaaattgccagctagcctgcagcaatagaaagcagaccagtggtggctggacagaaaggtgggaaaggggaggcaggtgacaaagggcacaggaaacttgggggtaatggacgtttttattatcgtgattgtagtgatagttttatgggtgtttaagtacattgatgtatgtcagtttctaaaatggcacactaaacatttgcagcttatggtatgtcagttatgcctcaatgaaactggaaagaaaagtcagggagataccactatccacccatttttttttttttttttttttggagacggagtctcgctctgttgcctaggctggagtgcagtggcacaatcttggctcactgcaacctccacctcctgggttcaagcgattctcctgccctagcctctcgagtagctgggactacaggtgtgtgctaccatgcccggctaattttttgtatttttatagaggcagggtttcaccatgttagtcaggatggtcttgatctcctgacctcgtgttccgccctcctctacctcctaaagtgctgggattacagccgtgagccactgcgcccagcctgccatactttttttaaaaggctgaaagtgctacttgggttttttgtttttgttttaaggcaaagtctcattctgtcacccaggctgtagtgcagtggcgttatcatgggtcactgcagcctcgacctcctgggctcaagcgatccttccacctcagcctcccaagtagctgggactacaggtgtgtgccaccacgtctggctgatttttctttttttgtagagatggggttttgccatgttacccaggctggtcttgaactcctgggctcaagagatcctctcacctcaggcctcccaagtgttggaattacagagtgagccattgagcctggcaaaagtgctgcctggaactctcatgccatacacctacctgtgacctagcagagatgaaggtgtgtgtacgcagggctgcgccaaatgctgacagcatctcttcatgagaaccccaaaccggaagcagccccagtggccatcagcagatgaatgggtaaacaaagcagtgtgtacatccagtgggaaaaatgtgtgcctattggtttgagttgcttttcttagctcacctgaaagtatgaggtctgtgggtaggtacagaccttttaggcagcaacacgcatgtttttgtgcaggtgctctgggtgaccttgtagatagatgctgcttggtactggtcccactttgttccttcatcctcaggtcaggtctgcactgcctgttccgtctccactcctggtagcctgtgggagtcacagctgaatagtcatctcgtactgggattttactctgagtgcatgagttgtttccctaggaaaaacatgctgtctttctggatcgtaagggacaactagctaaagctcctagccgacctgtcgtccagccctcactctcctcctgccagacttctctgtattgcctccacttctctgagtgtgtaaacctgggctcacttttccttttgaagtggtaaaatactcaggatagaaagttgctactttgtcttcaaagccattgtcctgacctatccttgactgtccaggtgaacacaccatcttctgctgagccctgagattatgaccaaggcggggtgagttccatacagtcttgggttccgaaaagtggtgagtttaaaatctgcacatgtagctgggcacgatggcccatgcctgtaatcccagtactttgggaggctgaggcaggcagatcatttgagctcaggagtttgagaccagcctgggcaaaatgtccatgatcgcaccactgcactccagcctgggtgacagagtgagaccttgtcttaataaaaagaagaaaatccaggccgggcttggtggctcacgcctgtaatctcagcactttgagaggcagaggcaggtgaatcaccggaggtcaggagttccagaccagcttgaccaacatggagaaatcctgtctctactaaaaatacaaaattagctgggtatagtggcacatgcctgtaatcccagttacttgggaggctgaggcaggagaatcgcttgaacccgggaggtggaggttgcggtgagctgagattgtgccattgcactccagcctgggcaacaagagcaaaactccatcttaaaaaaaaaaaatgctcatgacttcattttggctttttgaatcctctggtagcccaggtgtggttttagggtgccagaacattggagataagatgccgtttacctggaggagtgttggcaagtgtttggtcagcacttaccccttagtagacttactgagtgtgttttcaaattgttaggagtttcccagtgattatgtgaaagtgacctgagctgacactttacagttagtggtgaatacacgaaacaatttctatttttatcacaattaattacccggattcaggatgacggggtgggggattatgactaatactataccaggactaactaaaaaaagagttccctctcagcctagctaccaccaccacaaaagcttaccaccatcagctaccaccacatttctctcattgcttgattgaagtctgatgacctaccagggaacccccttcttttctttttagacggagtctcgcactgtcgcccaggctggagtgcagtggcgcgatcttggctcactacaacctctgcctcccgggtttaagtgattttcctgcctcagcctcccgagtagctgggattacaggtgcgcaccaccatgcccaactaatttttttgtatttttagtagagacggggtttcaccatgttggccaggctggtctggagctcctgacctcaggtgatctgcccaccttggccttccaaggtgctgagattacaggcatgagccaccacacctggcccctttaagtatagaacttagtgctgttttagtaaatttacggaattgggcagccaccacagcagtgccttgctgtctctgatttctctttcgctcctttccgctccctccccaccaccccttgtcagaccctgtgctcatgcccaaggtcacccgttagggaggtgtgtccaccgcctcagactgagccctgccctggggaggtcagaaacatggccaagccctggccccatgctcccccgcctttaagccccgtgtctgttaacttttgcaccctctgcgagctgctgggcaacctcttcagcctggccctggacttcagccatcccctgctgttttcttacttcctggccttgctgtgcttgtgggactgagggcagtgaggccagcagagggagagtgaagcctttgacccccgcggttgcactgttagaagacagcacatgccgcctggccagggtgctgtgagggccccaggagtaggagtgggctcccctgctaagggaaagcctgtgggaatggcgcctctggagttgttcagaagctgtacctgccaggcagaggggtgggcacagcactttgcctagaaggagggagggtggatgtggggccagtggggccagggcaggggctgggctgtgtcctggagcctttaggagctgctggggtgccttgaccaaggctgggaggagggctctgagatggcagtggcgggggttaggggaggggctgtggtgttggaggttgggcattgtggcccaggttggaccccgaatggatggaggggccacagggcagtggagacggaggacaccgggatcagggctgtgtgtgtacatgtgtgtatgcatgagtaagtgtgtaagtgtgtgtgcctgtgggaactgccagggtaccggctgccccctcccagtcctcacagggagccacagacttaaaaagcagctccagctcctgcctgtggtctcatcagggtccataattccccaggctgagccggggctctctccgctggggaggcaccgtcctgagggccttgtgagagggagaggcctccccagagcggctgcaaggaagctaaagggcacatgctgggcagcagctcacaactgaggggcagtttgtgcttgtcatggtggtgagagtgctttcatggtggtcgggatagtctagcttggcagagaagggccgtgacacccagctgtgctctgtggcattcagggccgaggggcctggctggaggggctggtgggaggagtgggtccgggccctggcaccagtgctgttcggggctccggagggttcatggccttgagctctccttgctggagcacatacctatgagagcaaagttctgctttctctgatacatggagggctgctgggtcctggagtctggtggctggcagcaggtccttgtgcctttttctgtgttggtcgaatagcagcttaagagccgggtaacccagccgggcttctcaggtcccgtgggcctttgccaggatggtgtctagatgtgtaaaggtggctcgttgggctctagagagcccttgtgacagtgagcatggcatcttcctgaagcatcagctccttgcagagcgagtgcaggctcctggcggccctgggagagggggttgcagatcccaggcagaggtgtttggtcagagctgcgctgcctgcaccgtcctcacctctttttcagtacggggatccatgcgcatagcttgcagccctgctgcatcctccgtgtagaaacgtctacgatgaattctctaacatacaagagctggtgagccctgtgcctccgtctccctgatgagacagttgtgaaggttttcttctccctgttttctttttttttcttcactggtgtgtgtttttaaagcaagtcttttgtgtcctttcacctttgtgtctgaggtggagccctgtgaattggcgatactcagccattttgacctgcagtatgtagtatgcatttctagaagcagaaaagggcgcctgtcctgaatagctgcagcgccgttatcacacaagcagcgtcaacaatggcttttcacgattgtccgatatgtagggacagttggcctctctccacagcagattctttactgggatcctggaggtccgctgttgagatgatggctgtctctgggccctgcgttccgagcggcctctcccgctgcttttcatctcgccaagctgcagtctggcctgggttgttgtcctgtgaggtgtgcaccttctggactgaacccctcattgtcacacttcagcttcttgctgaaggtgtggagtggatttcatctcaggctgtgggctccagggagagtggctgatccccgggctgggaaggcaggggcggcctgaggtgagctggggatgccttgcacactcggcccgttgaaatgaacctcacgcggactctagcacacctggctggaacaagggtctgccggtccacacaggtgccattggtgagaggggaggcgagaggccctttctctttgggaagaacgaatgtgagcctaggcaacatattgaaaaattaaaaaactttctaggcattgtgcacacctgtagtctcagctacttgggacgctgaggcaagaggatctcttttaagttcaggagtttgaggatgcagtgagctatgattctaccactgcactccagcctgggtggcagagcaagaccctgtctcaaaaaaataaaggaatggagagcctggggaccgctgtgtcgggtggtgggactatgtgaaagatggtcaactcctagcagtttcacgtggttcaaactaatagattaaaggtggctaaagagacatcacaaatcacgtgcagtcattaactgggacttggattcttaaaaacctgtaaaagacgttatgaagacattggggtgatgggtgaatgtgtattaaccaacagtgtggcaggctgggtgcgctcatgagccagctgttttgtggggatgtggagaaagccctcccctggggccggccactctgaaatgggtcaggaagagataagtgtgtgagagcaaggggagtcggagtgcagggggatgtgatggagagtgtccagctggaggggtgtgggggtcggatttctgtagctttggaatttttaaaaataagaggaaatatcagggcagaatccttccagtttgggggccagacctcctggcaaccctctgccttgagagggctcagagaccctgcagcttcttggcagtcatcactctgagggtgtggtgaacttcctattccctcccctttttttcctttacaatttttttaattaaaaaaaatttgggggggtgctgggtgcagtggctcacacctgtaatcccagcattttgggaggccaaggtgggtggatcacctgaggttgggagttcgagaccagccagaccaacatggagaaaccctgtctctactaaaaataggcgtggtggcgcatgcctgtaatcccagctacttgggaggctgaggcaggagaatcgcttgaacccgggaggcagaggttgcggtgagccgagatcgcgccattgcactccagcgtaggcaacgagagtgaaactccgtctcaaaaaaaaaaaaaatttaaatagagatggggcctcactatcttgcccaggctattctcaaaccctgggctcaagatcctcctgccttggcctcccagagtgctgggattacaggtatgagccatcacgcctggcctcctgccctctcttttatttaagccttggaattagagaatcaggaatgagctgctttgccttttgagcttggcctttagccaacaatgttgagggcctcctggggtgcaggctccatctaggtgctgggctcatggcagggagcaggacagacaatgccccacgggggccttgaggtggggtcagaggatgcctgcctgagaggcaccctgtggacctcaccctgaggctgagggaacagcaggtgcaaggcctgggtgctggcaaatgcagacagtggtgcaaatgttggagtagatgtctgcggcctgagagtttatgatggcacatttggggggatttttgagtttttgaatttctgtggttttcgtctgtgggaatgaagtgactttctttgttttttttttttttttttgagacagagtcttgctctgtgactcaggctggagtgcagtggtgtgatctcggctcactgcaacctccgcctcctgggttcaagcgattctcctgcacggggattacaggtgcgcatcaccatgcccagctaatcttttgtatttttagtagagatggggttttgccatgttggccaggcttgtgtgtgtgtgtgtgtgtgtgtgtgtgtgtgtgttgttgttaagagagacagggtcttggtctgttgctcaggctaaagttcagtggtaccatcatagctcacagcggccttgacctgctggggtcaagcaatcctccggcctcaacctcctgattagctgggactacaagtgtgcgccaccacacctggctcgtttgtgtatttttttgtggagacaggatcttggctgtgttgcccaggctggtcttgagaactcccgggctcaagcgatcctcccaaagtgttgggatgacaggtgtgagccaccattcctagccttgaagtgacctactgttgtgctgccctgatgcacggtctgagttctggagcatgtctctgggcagaaagcccctgtacagctcttagatggacttccaggatgtggttttagtcgtagctaggttcacatccagaactaaaggagttagagactccagctctggggcctcgtgtatgactaggaagtgggaattctaggatacgtctttaaatactgtgtccagagcagaggtgatgggaggagctgctttttttgggggccgggggggggtttgggtttttcttttttctttttttttttgagatggagttttgctcttgttgcccaaggtggagcgtgcagtggcacggtctcagctcactgcaacctgcgcctcctgggttcaagcaattctcctgtctcagcctcccaagtagctgagattacaggcacgtgccaccacgtccagctaattttttttttttttgcctttttagtaaaaacgaggtttcaccatgttggccaggctggtctcgaactcctgacctcaggtgatccgccctgccgaggagctgcttcttggtgaatgcctgggatgggtacagggaggccttgcccctccagagcctccctggtgaggggataagttgacagcctcaaaggactttattggagtggcagctctgtgccagctgaagatgatgaccctcttgtccttcacccatcatgtcccctggcgtgggctgtggaacttctctgtgccaggcactgtcccctactgctgttttacctcatttcatgatagttcctagggtcaaatatatttttgaaattaatgttttatcttgaaacttttcagagagtgaagggagaagttaacccagaagtcagcttgtgttgtgaccagatcactgcagggcagcattgggcccagtgtgcatctgtgcgtgcaggtagcacgtgcccatgcaccccagccaggcgggctggaggggcctctgtggggtgctgctccccatgagcacctgtccctaggctcgcacaggtgctgcatcacacagcaagggcattaggccgaggggctgtctggggtgctgggactggcagtgggagatttggtgccgtccctaggggagctcccatcactcctccctggcccttaattttgtgccaccttgtgttctgccatgacacagtgctcccgctgcctgaccccgtggtggggttaggtggcctatgggggccatgccagggactgttggccatgtcatttgaggtgctggtacttgggagtggcatgaggagccccagtggctgtgtggtctccttgcaagtgtcctgtgcagttgtggcctgatgacttagagccatgcgctgtctgcctttgctgaacatagaagaggcgccttcagtgagggtgtggcctcggttgccaagggtatctcagtgttcagtttctacttcatcctcaggagagggctgccttgaagggatggggagggtgaggtggcagtggatgtggccagtgacatttccacatctgcatgggtggcagcttcgtagtgtttgatgagccttacactgtggtgggtctggcatcatgaagctgtcctcagggcacactgctgtcagtctgtaaaagtcaccctgctccttgtggtcctcagtcatgggaaagaagcatcttcctaagcatcctggttgtgggcatggacatggctctgtggctaggcgggggttagaccagctgtgtgggggaccggggggtgtagaaggccaccagtggcccttttttggccaggtaggtttgctagagaagagtgaaatccagtcagaacaagggaaactgtctcaaagcagagatgaggccagggtgtcacaccagagtcatcgaggctggttcttctgcactgagtcctggaagctgcagcctcactcaggtgacactgcgttctgctgcaggttgggcccgaaggcatcctgcagaacggggctgtggacgacagtgtagccaagaccagccagttgttggctgagttgaacttcgaggaagatgaagaagacacctattacacgaaggacctccccatacacgcctgcaggtgagctgagctcagctgggcctgggcatgtgctggacaggtgggtgcctctggcatgggcctgggacactcacctcccaggtacagggtggcgcccttgtgctgtgactctgggtggcggtgtcctcgggagtaaggaaattgctcaggccatgtgcacagccaaggcctgttaccggtcaggaggtgggctcagcaacctccgacaccctgaattcaccagctggtgggaaaagttttccttcctttggcctcctcagaccctgggggcattgcctggtacctgcgcactcactcatagaaagaatttgtcatggcattgggtgagcatctggggtgggagggtgagtggagcagctgagataccctcacaaagcagttgctgcagggttctggggcatccctgcctcccgctgccttggccgtgcctggagaattggatgtgaagacagtagttagtggatagacctgcatgttgacaaatttagaattctcatctcgagtgggatcgtcccttgttgaggcttatttctgtatttttgtgacacacaagtgaggaaatgtagattagaagaggggagaaggttttggccaggcacggtggctcactcctgtaatcccagcactttgggaggccgaggtgggcagatcacgaggtcaggagatcgagaccatcctggctaacacggtgaaaccctgtctccactaaaaatacaaaaaattagccaagcatggtggcgggcgcctgtagtcccagctagctacttgggaggctgaggcaggagaatgacatgaacccgggaggcggaggttgtagtgagccgagatcgcaccactgcactccagcctgagcgacagtcacggcaggtttgggcctgagccctgcctctgtctgtgggcacccacttggggccctccctgcagctccttgcccgcgtgctgcccagcgctccgggactgaggctgctcttcgctaggcttggtgggcaggcactctttcctgcatctcagctcttcactcattctcatttacagatgttttcgtgtatgtaattgtgttctcttaacacacagagatggccataagtcctggtgcagctctggggagctagtatttttgggtttggtatgtggattttcagaaaaccacagccagtggtggggtgaggctctcccgaggctcctcgcttgggcttcggggcctgagcttcagggcgctgctgctgcagggtctgtgcccagctccctgggagcacagtgccctctgctggagcccagagttcaccatgaccactgggtctgaggctggattcctgaatttcaggccaaagaacggggactagaatggccctggaggagtgaggcctccttccagcaggactctccttggaggtggctttgctccttatcccctcggagcttctgccacataccccttccctgcattcttggatttgagaagccctggttaactggtttgatttggttactgggattgttggggttgagtatgtgtttaatgaagaacttaaaaatgttgtcagaggaaagaatttcacatcttgccaaatgaaaaccagagagcaagcttccagctgtaactgtcgctgttttgattttttagttactgtggaatacacgatcctgcctgcgtggtttactgtaataccagcaagaagtggttctgcaacggacgtggaaatacttctggcaggtagataatcagaccatgcatgtgtgtttaatcagtgctgtgctcagatttgtgtgtaaattatggaaatgttgaagcaaagcgtaatataaaatcacgctaacaaacctgggttttttcctcctctgtgactggtttaacttgaaacagatggtggtgtgtgaatgccttaatgtatttacccttgatttattctctgtggctctttttattatgcaagtagggttggcttaattctccttcccagtttttatttcgatttttctgcaagatgagctcttggcacacccgctgatcttcattaacgggaggatgttcccaaggcagtaacgggcatccaggggcgctggttcctgagcaagcttgctctggcctgagctcatcggagctgtccggaggctaattcaggccagatcctgaatcatcggcttcaattaagttcacttgaccgtcggcgctgggcttgccttcctgatgttgatcagctgcagctggactgtgtcgcttgttctgtgtttgggacaggacagtgttctcccagtgcccaaattccaaggggggagttcgatggtcttgcccgagtggtgggactctcgtcctggtgggtcccgtgctagcggctccccttcccctccaggttgctgtgtacaggtcactccactgctggagaggatggagcagagcctgggaggcagagctccgaggtgctagcaaggaagtgtggggtctttttctgaggttcacgttctggagaaagaaaatgaccaaagcccggaggcaggcttacttgtgctgacacaagcccctcctgtgcctttgacagctgtgggtctcggagggttacagatggagcagtcagatctcgtggcatctctgagttagtaacttgaaatatggtgttatgagcaaagccagaaaggggctgctgtttttaaaagattttaaagaagggtatcttctggataaccaaaagacattcttgtcccattttcagaatcttctgggtaatttaagtgttgctatgtttgcatttagttcctcttgttcaggaaaagcaactaaataaaacttctcttagctggcaaccccagcttccggtcagcatagccaagaacagggaagtgagcaaaagggcctctgagaaacaacaggcttgagccaagcaccactgagcattctgtgcgaggcccaggggaaggtgaggaagcagccgctggcccttagggatcttggctgtgacagggtgaggatgcatgagaagacacggagacagctgattctgcccacgtggccggcagggctccagagtggagtcgggctttggagatgctcagagtggccatggctggttagagaatcctgggcctcgtggcagggagaagggttagaagattagctgagctgaagcttttggcaagaatggttttccagaggggaagagagagggcgcggtgaggaaggctgggaggccctgcaggcgtgttcagagctgctggagacaccggaagagcccaaaggcagagcagctgggcatccttgttagatacggcagataggtgctggagggtggctggcttggcacagggcagggttcagcccagaccgcggtttaggtgagcagtgtcctggccacgtcgcagcaaggaaggagccgagccagccagggcttcacacacagccctgggcttctgtagaaccgcccccgcctctgctcaacctttttgctgctttttgcgggggtttccagtcgcctgcttatcagatttcccggcctgcagcaaagcaggagggactgttgctcctggaagtaggcacagggcctctgaggagtgatttcagaagaagccacagaagatggtggcgggggttgaccttggaaagaaggggctggggccttgtgggaaatgtctctgaccccacagcagccctgggccaacaatgggttaaattaggcctgataagttggatttaagaaagcaggatttttaaaaaaggcaggaactatgtgaaccgtgttaaggaagttttccttaaagtggttcaagttgggattgatttttgtgctcagtggggagctagtttgggggagggctggcccccagagatgccagatggatgaggtgtgactgcctctgctaatggaccgtgaacggtaccggaacttttaacaggggcccgaaaattggaagtggtgaaaagccaaattttgggtgttaaccgtttatcatttcctggtttcagccacattgtaaatcaccttgtgagggcaaaatgcaaagaggtgaccctgcacaaggacgggcccctgggggagacagtcctggagtgctacaactgcggctgtcgcaacgtcttcctcctcggcttcatcccggccaaagctgactcagtggtggtgctgctgtgcaggtgagtggtccccagatgtctcctgggggtgacctttaagctccagccgtctcctcacaagccttggcccagcccagcccagccgtggctctaactccagggagttgtcctccaaagatggtttttgctgaagggtgaggcatgagagcgtttaggcgctgaggcttgttaaggagtcggcagtgccgtgtaactcttttggggcgttctggctaagtcataaaaacaattctgtaaaaacaaagtctgttctgagttttaagagttcagagctcaagtgcacagggagatgcgatttattactaacagtttgaaggtaatgtgatcacataataaaatgcagggcatgcccctttgggtgaaaggtcagcatgggagggggccctccctgctccggggcttcagggacgggagctggtcctcacggccccctcccgctctgcaggcagccctgtgccagccagagcagcctcaaggacatcaactgggacagctcgcagtggcagccgctgatccaggaccgctgcttcctgtcctggctggtcaagatcccctccgagcaggagcagctgcgggcacgccagatcacggcacagcagatcaacaagctggaggagctgtggaaggtggggctgcccagcgggccgacccgtgccttcgtgtggtttctggttgcggggaggggagtgtcttcagagacggcttgacccagtgagaccgctggagattctctgaaaggaattcaggcagacctctgccacctctacgtggaatgacctcagggcaccttggtcaccttccatccaggcagccttacctgaccgagaagatcctggccttggggaaaggaaagctctggctgctggaatttttcttgtcttgccggggtgaggatgggtggtgggaggggaagaatggggctggctgtgggcagacttgtcctgcagagcctgaacctgcccagacaggtgggctgcgagaatgtcctggggaaataggttggtgtcgaggtcggcacagtcagctgagacagaggggagaggagagggtgccgggtcaagtagtgggtgcctggccctccttccacagacagccctcacttttccccacggaagcctttctgtgcttccagctgtttaggattttgtgataaagtagttctaataactaggctagaagttttcatttgcctcccattcagtcagaaatctcacataggaaatgaagtgcaagttaaaatatttttttaagcattgttcagccgggtacctttccacttggattttccggttgccagatgatttcatgattcccgtttatatctgaacagcccagaaaatgtcctgtccccaccagcatggcactcactgagggagctggcccccaggggaagagctgcgggcccatgttggtctggctcagggttagcagacgtgggagacaggcctcccgggctgtggacacagcgagagaaaccggtggtctttgtggcagcctgcgaggcgggttagctgctctcgttcacaagctgggcatacttggaggaagcagctggctctgaaggtgccctctgctgtggacagtgtgtcaggctggtgcctggggctttgtaggcaggttcacccaagtaccggaaccccgctggggtgcggagcagcagctgaggcccaggcatgggccaggccggtgtgcagctccctgtgtggcatggagttcccgttcccagggttctccttgcaggtggggctgcgccagaacccctccatgccacccaccgtggcccattctgagaagcggcatgtgtgctccatccctctggtgcctctgcgccctcgttcatttgcatgtagggaaaaacaggacgagtgtggcgcggtgttgttgtcttctaggaaaacccttctgccacgctggaggacctggagaagccgggggtggacgaggagccgcagcatgtcctcctgcggtacgaggacgcctaccagtaccagaacatattcgggcccctggtcaagctggaggccgactacgacaagaagctgaaggagtcccaggtgatgtgtgcgagagggcttggcctggggtgggctctggctctcacagctctctcctcaggcttccagagggaggttttctctccaggctgtgggagctgatgtgggctgcagccgcgacacctgagagttggaacttgcggatccgggcctggcagcccggtggtctgagcccccgccctcagatctgacatcagcctcagtgttttctgtttaaatccaacacatctttcccagtggggtccacagctttgcccacagttgcgagagttagactcgggcgtgatccctgtgaagaccacatttaggcaacgggagccctggagcgctgacctcccctccctccctcccctcctctttctgtccctccctcccctcctctttctgtccctccctcccctcctctctctcttcctccctcccacagcagctgctccctggccacggaggcctctggtgtgcggtgaagcctccagacgggattggcctgtgtgtgttccggggactcctaatggcttctctttcagatgtgcccttggtggcatttggggctgcaggtgccactcacggcgcctgctctcacggcagaggcttgctgtagggcccgcctcatggggcctcgggcatgtggaggccaggcccgggcctgtgctggaggctaaccggggctcttgtttttcatgtgctcagactcaagataacatcactgtcaggtgggacctgggccttaacaagaagagaatcgcctacttcactttgcccaagactgactctggtaatgaggatttagtcataatttggttaagaggtgattttaagttttaaaatatttgtgaccataagtagcataaattcctagttccacccttgtaaagtgccccttaatttgaactctccctggtggaagcgacggcgtgggttaaaatggccacctctctcacttttttacctcaagacatgcggctcatgcagggggatgagatatgcctgcggtacaaaggggaccttgcgcccctgtggaaagggatcggccacgtcatcaaggtccctgatagtatccttcatgtgaagagggtgtggccggctggtgggagaggaaagtgggggcatcaggtggaggccactgtggatttgatgctcactgctgggccagcatctcatgctctgtggtgggtgctggttggcatcgccctccactgctcttaggagaatcacagggccttcaccttcaggggacagctggttgtatggttgcttcccctctgcccgaatggtgatgttggtgatgccacttgtgtggcgcgtccctgggctgactctggaagttaatgtatgccgcttgtgtggcacgtccctggactgactctggaggttaatgtggctgcaggagcgccttacctggacgctgactctgcacacggaggttccagaagccagtggtcacatgcagaccctctgagcacacacttgctcccaggccatgtttgggaatgtgcagtgacctcatggtgatgcagcctgccggccagagtggggcagctgtaaggcacaggtgcagtcagaggcttgggtggggaggagtcctgggagaagacaccgcgggtcagactcaggctgcctcttggtgactggccaatgctgctggggcctgaccattcagcggtggcctccacaggggtagggagagttgtctcccacacccaccctgggcctgacaagctcatcctgaacacgtgagaccggttttggggctcggggtcgagggaagggtgttgcctaccggccacagcctcctggagggcagtttgcttgtgtatgtggagccttttgcttggccgtactgggaggggtgttgtttctgtggaactgtgagaagagctgctgtggccaaagctgggttctgcgagctctgcctgcccctgctggccacatgtgcaggagctcccggtgaggtcctggggcccaggatgtggctgctccctgctggtgagcgctgctggcttcgctgccgccctctgcgtctctgaaaggggcctagatgggtggctgggagtggcaaggaggaactccaggctggctgggggtgggacaccggctcatggtgaggtagagtctttcttcaaggatgctgtccttctggtctctggtctggtgttggctgcacgtttttagcgtttggtgcagagccagcggtgtcttaagtaactaaattttaaaaacgctgtttaaagagcgtgtaccaagggtggcccagaaaggtcagcccggcttttgacaaggatgcaaacttaactcagcacacagattatggcgatgagatcgccattgagctgcggagcagcgtgggtgcacctgtggaggtgactcacaacttccaggtggattttgtgtggaagtcgacctcctttgacaggtacgtcttctcccatcactgccccctgttccctggttgccacctgtggcatctttatgagccctccccgtcactgtggagtggggttccccacccagctctgcaaactcaggatgtcggagaggcggccacagctgtgcgtgtcgccaaccccaaaccctcctcacaggatgcagagcgcattgaaaacgtttgccgtggatgagacctcggtgtctggctacatctaccacaagctgttgggccacgaggtggaggacgtaatcatcaagtgccagctgcccaagcgcttcacggcgcagggcctccccgacctcaaccactcccaggtgcgcgccgtcctcagcgcgcggggcctcgcccatgggccgggacgcaagcggaggctgcccctaacggccgcttgtattgaaggtttatgccgtgaagactgtgctgcaaagaccactgagcctgatccagggcccgccaggcacggggaagacggtgacgtcggccaccatcgtctaccacctggcccggcaaggcaacgggtagggctgacacggcccttgcgggcaagacccgggagggctttagggtggccagatggaaggcctggtgctgggagccttgggctctgtcacaccgaagagagcacgtggcgggtagtgtcgccatggtgcctaccgctctctatgtgacattattcgtgtcagctccaaccttaggattgcattttagtaaccaggtctgctactggtttagaaaactgggggcagggggggcatggctgcagcagcgtgagttccgtgtgcggcactttatagtgtggcgggatggtgcaagttccagccttggcattgcttgcggtgggtagagctgtgaagcctgggctgtctggatctgagctccttcggcatcgtgtcattactgcctgttaaaaatgtcaggagtttaaggccagcctgaacagggtgagacgtctctacaaaaaaaaaattcagaaattagctgggggtagtggcgtgcacctgtggtcccagctactcaggaggctgaggtgggaggattgcttgagcccaggatgttgaggctgcaattagctgagatcacaccactgcactccagcctgggcaacagagcaagaccctgtctcaaaaaacagagtcttggcttactacgttcaccgagcttcctctgggtaagcactgagctgccccaatggtgttgcaggccggtgctggtgtgtgctccgagcaacatcgccgtggaccagctaacggagaagatccaccagacggggctaaaggtcgtgcgcctctgcgccaagagccgtgaggccatcgactccccggtgtcttttctggccctgcacaaccagatcaggaacatggacaggtgtgtgtcgagtccatccctcccagttggtccctgagcttctgcgggtgacatgtacagaactcaggcaccctgctgacctgcatgtgcttccagcatgcctgagctgcagaagctgcagcagctgaaagacgagactggggagctgtcgtctgccgacgagaagcggtaccgggccttgaagcgcaccgcagagagagagctgctgatggtgagtgcccctcctgcctgcaaaagggcctgtgggctggcggcctgatggtttttgtttgggccaaagcacctatttgaattgttgctttgcttctggaaagagaacttagatgctctctacttggcctctctgcgctcagttgtacagtaaattagggacatctcgctgcctggaacacggtcttctagggagtctccactccctgccagcctccactgggatccggcagtggatctagaacactcctgctctttcataaccaaccagcctgaactggaatcagcctgagtgcaggttccagcagctcagcactgccccttggaggctgtcgtgaggcgcagagctcttggtgtggagaggttgccttctgtgaaacatgaccgtttaaggatcttaaaagtttgtaatcaccacagcctggaccatgtatcttgtctgggagggacagcttgttttttatagtgtcagggagggtgagaaacaggagagcttctgtgttctgtcccacctgccctccggggtctggtggcgtttacagtgcaggtgccctgatgcctctgcacccttccccagaacgcagatgtcatctgctgcacatgtgtgggcgccggtgacccgaggctggccaagatgcagttccgctccattttaatcgacgaaagcacccaggccaccgagccggagtgcatggttcccgtggtcctcggggccaagcaggtgggctgcctcccctgccctcctgtgtgaaaactcgtgtgtgtgattcttggtgtttgtcttttaaaacaccttgtattgacgtaggatgcccagcagagtgtgcgcacactgggggctccctgaggggtttatagagggtgggttctgccagctgcacgtccagtgtgcgtggtgagcaatgcccctgtggccaggtggtgtcctgtgcatcctggggcccctacttccttgctagtgtgtgttgaggctgattcacacctgagcttcttgacttgtgggggcccctgttcctacagctgatccttgtaggcgaccactgccagctgggcccagtggtgatgtgcaagaaggcggccaaggccgggctgtcacagtcgctcttcgagcgcctggtggtgctgggcatccggcccatccgcctgcaggtccagtaccggatgcaccctgcactcagcgccttcccatccaacatcttctacgagggctccctccagaatggtgtcactgcaggtaacggggctctgcccagggcaggggcttctacagagaagcggcatcaagggaatgtggactggggagaaggaactggcccatcagcttcccctgagcggcttcacatagccactgcttgaggtcagggcactttgtgcccaaggtcttgatggtatggtcttggatcaagtggtgtctctggggcatgtggggagcctgtgtcctctgtaaaactcagtcattgcctgagaattcatccaagcctcatgtggcagcatgcacagcagccaggacaggctgttaggggagctgagcccgggccttaacgtgggctgtgcattcagtgcttcatgaagaacagctgttctcagggcctgggcccctggggcccgcaagaccgtgtccggcttccctggataacacagaggcctcacctgccctttttcactctgctgacgctcacactgctggtgaccccctggtgcttctgcaagagtcagcccagagcagccagactgtgcccggatcacagtaagaaacgccctggatgaggaagtgaacagtacatcttactaagcctcgagtgtttcactgtgaccagataaaatttctcgtgacacctttgggtatgccggcgcttgaaggaagtccttgtggacacaccctgggtattcaccccaaggtgttgggcagactttttccaaaaatgatcgaacctgtcgcttcatggagaactagtggcaacatctgttacagtagtaaaattcaagtgaaaaccagaattttggaaaacttaacgtcgcttgccatgagcttggtgtcttcccaacacctagagacttttctggtgaggtctgtgggggtgacagatggaatgtttccaccattgccagtgaaatgtgtcagcctttggaagacctacttgactcggtgggagatccttcctgaatgaccagcagagtgtcacgaagtcacatggggatggagtggcaaagagttgtcacaggcctgcagaaacccacctttgtccagcttgatgtggcctcagggctggagactcccagccatgcagaaaggctgtaaaaacaaacccatctccctttccagcctcaggcatccatgaggcctggcttccccacagcgtccccagagcccaggagggtggactgagcagaggtggaccccagggcccagctgcctccgattcagccagatagtaaggagatttgcagaaatgggagacaggaccactcttcttacttagcttatttttggagaaataactaacacgtaatgggttatttttaaatgaattaatatattttttaaatttccaagtttagagaatacagttatccaataaacaaaagctgtttggactccctaacttttgagagtgtaaagggtcctgaaagctgccgacacagcgcctcatgaactccaaacctgtgaggttggtattgtcaggcctagttacaggagaaagtgaggctcagagcccaccccccgggttgggccacaccactctttgcctagcggtaggtcttgggagttgatgccactattgacatcgcagggacaccgctgttcccagcgcatggcaaggctgaaaacacaaggccacagagacctagcttgtgctctggggtgtctgagcactggctgggaaaggcgtggctcggcgcaggctcagacccctcatggtccccagggcatcggcccagagggcagacgctggtgcacactgctctctaattgatgcacagcacgtagttcacacccaggaagtacattttaggaaattctctattgaagtgtaaacatgtggccacattacaagtgtctggctcaatgagtggttactaagtgagcatatttggatagccagcacctgaacccagaaccacctgaccagctgtgagaagccgcctcatccctgcaggtggccactgtccaggggtgcgcatccacagcagcccctgggctgagggacttctgagctcatccggcggcccctgtgctcgctgtaacagcagtgatccacttggcctcattttcagctcgacgtgggatcatatgatgtgtcctggcgtgtctggcttcctctgtccatgtcaggctggtgctgtgcaaaaacaccggttttctccactgatggaagctcccagtagagtgaggagggcacctgtgaattgagaaactggttttacagttttaaggaaacgcaacagggcccagaaaagccaagatgagcatgaagagcccgaagaaagtggctgctcacatggcaggacgccccggcccccaagctgcagtgttgggccccggcccaggagggagcccagaggcagagccaccggtcaacaggccctcagcaggaatggacaaggctgcagggcagggggacactgttggctcaacagtgtcacacacaagtcagttgtaggggctgtggcgcctttaaggcaagcttctggaaggaagcaggagaatatcctgtatcctggggttggcagagatccaggctgcaagaaagccctggctgagaccctgttccctgttcaggggctgagccagctctgtgctggccatggtgctctcggtggcctctcctcagccttgcccaatcctgggcatctctggccaggggaccggctcaggtgacctcaccagggcctcacagatcgaagtctcctgccccaggacctgcagcactgtagcgtagcaactacattgccctgtgtctgaactcatttgaggcgggctagggcttttgaagtgttacttctttccctcccctcacagcggatcgtgtgaagaagggatttgacttccagtggccccaacccgataaaccgatgttcttctacgtgacccagggccaagaggagattgccagctcgggcacctcctacctgaacaggtgagcagggacaggcccaccggcgtctgcaggtcttggggacagcttgagaggttgttgacccattctacttatttttaacatgggactgaaactttttttgccttcatttcctgtttagcctgtttagactctaaaccgtgttgtttctgcctccttttccattgtacttgttttttattgggcagatacttgctaatcccacatggcagccgtttctgcccctcgagactcccctggtgaaggctggggaagctcagctgtgcaaacgccagtgatggcagctgccttcccgcagggtgttgtgtctgcacccctcacggcctccagcctcagggctcgggatcccacaggtggagcccagcactgacagcctgggtttcttaggaccgaggctgcgaacgtggagaagatcaccacgaagttgctgaaggcaggcgccaagccggaccagattggcatcatcacgccctacgagggccagcgctcctacctggtgcagtacatgcagttcagcggctccctgcacaccaagctctaccaggtgcgctgcgccctcgggcacacttggtctcctgggccatgcaagggtattgacccttgacctttaagttaccccccaagaggggcccgtcctggctggagctcagaatggcccaggaagcaccagctggcccaccctctggggagggcacagacagcacatccccacagaccctgcgaaattccacatgatcaggacagagactttgagaaatacatcacagggatcagaaacatgggctgagattggcacatcaaggtgttttctcgggatggttgaaacaagtccaaggtggaacggcagtggtctgtgcctgccacacactggatgttgtgctgtggagaccgtggtgttcacacctttattgacacccggatgaaacacccactgcgggtgtgtggggaggaggcacagctctgcctccatgaggaaatgagcccaagtgctgagtctgagtggccacatggcagtggtttctgttctgtttttgagcacggctcaggttctctgggatgagcacgtgtgctcttagtgctgagaaacaaatctccgtggctaaaagagaacaggctaggtgtcatggcccacacctggagtcccagcactttgggaggctgaggcagggaagtcgcttgaggctaggagttccagaccaacctgggcaacgtagggagaccctgcctccaccaaaaaaaaataataactgggtatggtggcatgtgtctatggtcccagctactcaggagactgaggtgggatcagctgagcctgggaggtcaaggctgcagcgagctgagattgtaccactgtactctagcctgggtgacagagcaagatcctgtctctaaaaaaagaaaacaaaacgaaatggcagcagagccaggacagcccctaggtgcggtgagcaggcgccaggccccaagctcccgggtgggatttgagggtgggtcttggtgtgtttcctgcattttggggggactgggaaggcagcctgctggctgatagtgaccacaaagctcccttccaggaggtggagatcgccagtgtggacgcctttcagggacgcgagaaggacttcatcatcctgtcctgtgtgcgggccaacgagcaccaaggcattggctttttaaatgaccccaggcgtctgaacgtggccctgaccagagcaaggtagggaggctgcctgctgcatgctgcccagccgctcatcggtcctcacttcccagggaatttggggctagggttgggggttgccagggccagaggtcagaggactctgagcagcagttgagaaacgatgtctcactggagagatctttgtttccgtgtcctgggggtttgctgtggcccctgtgcctcagcccagcaggacgtatttttccaggcccttctggtctgattcaaaataaatcttgtgtgtgtctgtcaagttgtttaatctgagaggctgtaagttttggtcctgtccactatttttggttctaaaatacaacttttgtgaactgatgatagcagaagggaccccgagaacaaggtgtccattctgtcatcccacataaaactagacatcaggccaggcatggtgtctcacacatgtaatcccagcactttgggaggccgaggcaggtggatcacctgaggtcaggtgttctcgaccagcctaacatggtgaaacctcctctctactaaatacaaaaaaatgagccgggcgtggtggcacatgcctgtaatctgagctacttgggaggctgaaacaggagaatcgcttgtacctgggaggaggaggttgtggtgagccgagattgcgccattacactccagccactgggcaacaagagcaaaactctgtctccaaaggaaaaaaaaaaacactagacagcaaggacccattcaccagctggaagttggggggacctggcctgtggctccacccagcacagggagagagcctggtgctccttccggctcatatgcgcggtggttctcctctaggtcaccatggctttgtcattggttactccctctttctaaggcgccctcttgtttggtgggcagtattgggtgggtccccccacagcttcgtgaggtgggctagaggagctgggcatcgggtcagtgccccggcctgctgggggccctgtggggccgcgtgtgccccggtgcctggaaggccgactctcttgacagcaggtcttctctccaaacgtatccacccagccaggtgtctgccatggggctgcttagagtcggccacaaaatcaacccgtgtgcagggtcagtggcttggcattgggctttggggcctgtccctgtggctggcagcctgcctgctgcccggtccacgcctctgttgccttggatttgggttctgagtgaatgcagccttgcctcttggaccgtcctgtgagacgggcagctctccacctgcgtcctcagcactgcgcccttgttgcaggtatggcgtcatcattgtgggcaacccgaaggcactatcaaagcagccgctctggaaccacctgctgaactactataaggagcagaaggtgctggtggaggggccgctcaacaacctgcgtgagagcctcatgcagttcagcaagccacggaagctggtcaacactatcaacccggtgagcgcctgcacaggacagcagggcagcacggagaaacccgggcccaaaacactgctgggaacgtgccagcttggcccgtgtgcccgtgagctgagggagggctctcctaggggagggtgggctctcctaggggagggtgggccagcccacttcttgtctcccgagccgtgtgtggcatttttggcttggggccgctaagtcctgggtggcctctgggaattgggctcagggctgctgtgctgcatgcagcagcctgggaccttggacacgggcagttggaagctttgcaagcccggggtgatctggtagtgagggggtgtgaagcttcctgagctgaggcccaagggtcagcatcagagcccaggtctgccgaggagggcaggcgagacccagaggccatgagacagcagctccctcctgtctccagggagagcccctggcacagtgtcaacacctcacagctgcatacctgccacctcccaggccaccgggcccgtgggaagttgttccttctgttgagatgacaaattcctcacctatctaaaccttcgcagggagcccgcttcatgaccacagccatgtatgatgcccgggaggccatcatcccaggctccgtctatgatcggagcagccagggtgagtcgctcagcaggggacctggccgaccccttgtcctcacaccgggatgctggccgttcccatggctgcagctttaggtgcccccatctttccttcccctcaagggcggtgcctggctcccttggcctccccgcccctagggcatctctagccccggaacactcctggggtgtttgtctttaaccagagtttattcatttgtgtttcctggtgatcaagctagttagctttttcttgccttttggtagggcagggactgcatgtagtacaaatagaacattttcataaaaaggattttttttttcctttggtaaatgcagggtgattttcatttattttcttttttttgtttagagacagggtctccctatgttgtccaggctggtctcaaactcctgcctcaagcagtccttctgctcagcctcccaaagtgctgggattacaggcgtgagtcactgcacctggccaatttgcaggtgtttttttttttttttttttttttggagaccgagtctcgctctgttgcccaagctggagtacagtggtgtgatcttggctcactgcaacctccccctctgggttcaagcgattctcctgccttggcctcccgagtagctgggattacaagcacccaccaccatgcccggctagtttttgtgtttttagtagaaacgaggtttcgccatgttggcctggctggtctcaaactcctgatctcaggtggtccacctcggcttcccagagtgctgggattataggcttgagccaacacgcccggccccaattttcagtttttaagatctgtgtaggccaatgattcccagcagactctcctcggggaaggtgcctgcccaagcacccagccccaggcaggctgctgtagttaacatggagtcctgcgaatccgcatcttcagcctgggcagagccaggacagatgtgcagctccggctgactggctggtggggtgggtggggtatcgctggggtttgaccgaggcaggtgacacctgccgtgttccactgtgatttgcaggccggccttccagcatgtacttccagacccatgaccagattggcatgatcagtgccggccctagccacgtggctgccatgaacattcccatccccttcaacctggtcatgccacccatgccaccgcctggctattttggacaagccaacgggcctgctgcaggtgagcatctgtggctgcggctgggtgtggccctcctgagagctcttgagggtgtgcttgtctgcgaggccctggcctccttcggatcaccctggactgctgtctttcagggcgaggcaccccgaaaggcaagactggtcgtgggggacgccagaagaaccgctttgggcttcctggacccagccagactaacctccccaacagccaagccagccaggatgtggcgtcacagcccttctctcagggcgccctgacgcagggctacatctccatgagccagccttcccagatgagccagcccggcctctcccagccggagctgtcccaggtgagcccgcccctgggacgggacttacctgagtgagggtggggctatgcacctgaaacattccctctgaagagccccagagagctggcctggcccatgtccactgtctgaattacctgtccctgggctggggtcatcagagtgggtctcctgggtcttagtttggggacgggttttccattcttttctctggggctgctgagggctgggtggatgtgagcacccttggcctgtggcttgcttacctcctgaccttgtctttcaggacagttaccttggtgacgagtttaaatcacaaatcgacgtggcgctctcacaggactccacgtaccagggagagcgggcttaccagcatggcggggtgacggggctgtcccagtattaaaaggcaagcccccctggagcaggcctggccccaccccagcctcaaggagaaggatgggagggggctctccccagggagctgcactggaggggtggtatctggaaatgtgtgctgtgcctggtgggggtcataggccctcagggccagcttggcctgtgcccttcactgctagtcagggtggctcctcaccccaccctaccccatcctgtctgctccggggaccaccgcgggacctcagtttcctcatcagagtcggggagggcagctcgggctctccctcactgtcctgtgtgctgggtacctgtggggctcaggtcgcagcctctcaccgcctcctgcccttctccctcctgacaggtggcggcggaagagctaagcaacgtggcttagtccatcagcatcttattctgggtaataaaaaataaaaataaacggatacctgttttccactgctaaaactgaagcaccactgtgtgagcaacaggaagggagagcgcacgagggagaggagccgaggccgagcgccccctgctggcccgcggcggcgaggagcagagggagcggaggaggggccggcccgcgggagccgcggccaccaggaggccccgctccgtcccatcggggctgcggccagggcggagggaggaagaccctcatctcagagtagccctttcctctgttcttttatttctttttctctttgattgaaaggggactacgtcttagcaggaaaaaaaacttcgcatttctgtgcccgagcaggctccttgcaaagacagcagcgtgcggggcagagccccgggagggcgcgtctgtccacgcctaccggacgcgccgaggtcgcgctgcctgtgttctccgagggccttcatttaaagaaaataagggtgttttgggtttttctctttgtttttttcaagattcttttaaaggagtactgaagaatactttcctaagtttgtctgtaaaatcttagcggtggacctgggagatttgagaagcttccagaaacagtttaaacaagccagcgctactggagaagaggagcaacacctgtgccgcggccggaggagttttgttgttggttttagcttccagtggcttctttctgcggggcatcaggctgctggggtagccgcccgccgagcctggaagctgctcgttctccgctggactcagaagccaagctgcttcccgcctagactcggcgcagggccccgcaccggtgaggaaggtgcttttggccccattgcgaggggccttggccaggactggccctgtggccaggaggcgagaaggtggctgttcccggattgacggctttttcccgggggcctttggaagatttggtggaaggacaagagggcctgtccctgtccccgtccccaggaggtaccgacagtccctgtgctggttagacacggagcgctgcacaccgaaagcccaaattgggagctctgcctgccggcaactttgctgatggggtgattgctgcttctggggggtaaggaaacaagttacagaaattaccgcgttctgtgtgaagggactgagggtgtggtgtcattggcagagggtcattttaggagagctgccccagcccctcgaacgcctggcttggggtgtcattctgcctggcggccaggcctccagcttcccctgccccgggcctggggctgtcactggccctgatccgaacacctccagattccggcttctacatgggacagacggggacgcacaggccaccttccttctggcagggactcttatttattcccattgctctagggctttcggtttccccttcttccggtaggccgcgtagaggcatgcaccgggtaggtttccgcggtgaccccgcggcggcctgagggacgctccctgccccatcccggctgttgggctgggccgctttgcctctgcttcgccctgtgctgtgttctccagctttgtagcagcagccttgacaaacccaggcgcactgtaccaaggcaatgtaacttttgattttcggtcaatttaagttcttttgtcaccaaatattaataaacagttttgacttcacaccaaggttggataaactgcagggggtggagggtgctggggttttgccttggctgagtgacgggttggggtgtgaaggaggccagagggagacaggcaaagcccagaagggacaggtctgccttgcaggactgaagggcgacccctgcccctgggcccttcccgtaggcagcacctgggcctgtccgggcggctccccggagtggcgcgttaggcctctggcaggtggcctggaggtggaaaggcctatccgatcaccaagactgaggggcgccctccccaccacccaggcaaggagtccaaggagaccagcggagcagaccacgcggcatttattgttgggcccgcgtccctgcccgccccgggttagcggcagccgcactcgtccaccaccatgtcctcatactgccgcagcaccacgttgtcgctgttgtcaaagaagagcacggagatgggcgacaggcgcgcgggcacgcagcagggcaggtcggcggctcccggggcggccgcgtgcatgagcgcgcgcagcacagcgtggttgagcgccggcggccccccggaccccgacagcgcgacgggcagcgcgcactgaccctggcagtagttggccaggaagccgcgcggcgcgatgacccagcggtgccagcccacctcgcggaagctcacgtacagccgccgcgcgcgacaagcgcccccggggccgccgcccaacacgggttcggcgtcgcgccgcggccgggccagggggtggcacaggcgcgggtcgagggtcaccagcagcagcgaggcctcggccaggcgcgcgcaggcggcaggggcccgggggcgtagcgccagcgccaggcggaggctgcgcggccatgaggcgttgcgagcccaagcggcgcccagcagctccgcgcgcactggcggccccagggcgggcaccaactggcggagcagcaccggcccggggtccgcgcccgcgccctggcccgcttgcgccacgctcagctcccagccgccctccggggctgccgccgccgccgccgcgaaacgcagctccaggcgggcccggctcgggcgctcagcgggttccacagccgacaggtcgaagacgactgtccactcagggcaatgccccgcggccgaggcaggctccgaggcccgggtgggcgcacctggggaggtaggaacaggaactcggctcgcgctgcgtccccggcctgcccatggggtctcggttagggacagggaggaaggtgaacgctggggctcggggcgcaccgtctgtgggaagggtgtgaagcggcggggtgggctgatggagtgggggcagggcatgagttccaaggaaggcgccctgcggggtgcggcggggggggtgggctgccctcggcggggggcataggaggaggggtggccgaagtgggagacatgagccagaacctgggcccctggggaagccatgctagggtgtggggatggcatctgcaggaaggcattagtgtcaagaggtgggggtgggcatggggtggggacagggcttcagcatcaagcagaaggactggtcttgggaaccccctgacatgtgtccccggcgtgcagcagatgacgaggaaagggtgaggtgcggtggccgaagttgctagtagcctggacagggcgggtggggaccctcggagctgctcgggcatccccgggccactctcgaggctcgccctgcgaggtctggcctccaggaccagtgtccccagcgaaagccccactcaccgcggtccgggatgtggcgcacgatgtttccggcgacccccagctcctccacgtggcacggttgcagggtgacccctggggacgtccgccgcgagccagacctggtctcctgggggtcccggcgtcgaaacaggcgccacatgaccgggggaaccggccggagcctgggggcaccctggggctcatcgcgcagtcctagagcctggagcagggcggcggctgggcctgggggcacgggggcgcgggtcaggggcagcgagggcagcagcagggccaggaggaggaggaggtggtggccgcagggaccttgctgcggcggtggcatcttcctcccaggcgatgaccagagagtgcgcagggtccgcggcggcccgggaccagtgggctgagggcggggccggtgtccccggaggggcaggggtcctggggggcgtggccgggaactggaggcaggatgagggggcggggtcccaggggaggtggcggcggccctagaggagcagagttggagggggtggaggggcggccaaggacggggagcgtggccggggtattcggggtggggccgggtccacgggggcggggccgaggggttcagaagcgcttgtccttcaccaggccgttcctcagtggcttcctgggggtcagaaccggcgcaggttagcctgggagccccacgcggccgcctggccctctttcccgcttcttctctggccgtttcacaccccctggctccttttacccggccaggcccgggcctcgccttgtggcttcctcctcgccttcaccctgcccctccttgccttcaccctgcccctccttcaacctgccccgtaggcacgtatgtcccccctggcaccctggcacttcctccttgcttccccctctccaattaaaccttcctcttcccctcctccctgcctctccaggccgctggagggcaaaacccacgtaccggcctgggcctgacaactccaccgcctccacagtgggaccctgcacatcctcctctcctctgccacccaccccacgaaggctagtccttgactccagtggccctggctggcatctgctgtctccacctacttcccttccatgttcttttattttccttttttttttttggtcttactctgtggtccaggctagagctgtggcacaacctccaaggctcaatggatcctcccacctcagcctccagagtagctgggattacaggggcacgccaccactcccagcaatttttttttttttttttttttgagacagaatcttgctctgttgcctagtctggagtgtggtggcacaatctcagctcactggaacctctgcctcctgagttcaagcgattctcctgcctcagcctcctgagtagtgtggtggcacctgccaccacacccagctaatttttgtatttttagtagagacagggtttcaccatatcacccaagctggtcttgaactcctgacctcaggtgatccgcccaccttggcctcccaaagtgctgggattacaggcgtgagccaccgtgcctggccccagctaactttttttattgtttgttgagatgaggtcgctatgttgtagaggtgaggttgctatgttgtccaggctggtctcaaactcctgggctcaagcagtcagccctcctccgcctcccaaagggcttctgtcactttaattcgctcttctcttaggctgaagctcagcttctctgcatgcatttcacagccaactggctgtccccatccaaggactgttggtctttatctgagaggagataagccttgcttggacctcccatctgtcacttgtcttctgattttgcctgtgatccttgagaccgtgagtggcgtttcttcatccacccttgtggcttctcgattcttcccataaacaaacctccgtgacacactgtccccttttggctctgggatgactccagggattccatttctgcatcgacacctttggtataaggtgggggtttgccctaaggcttatgggaaacaaagacacaccctcactgtgttttccagagggtccccgtgctttccattcctgccctccaggatggtctttagtatttgctaaaggttttaaggtcttaggttagtttctccactcagttcccacagagagtatagattcctctaatggtaaagtttagcatcctcggtgatgggtgcccccgccctggggctttttatcagagctttcctgctgattcttgtttgttttttctgcaaaagcttcaaagtgttctctacccactcagaaacagctgtcagtatttgccttttgaggtgtgggtggcggtgtacccaccttgggggagatagcttttctctgttatctttttttcttgttttgtttttttttgagatggagtctcgctctgtcgcccaggctggagtgcagtggcgcaatcttggctcactgcaacctctgcctcccaggttcacgggattctcctgcctcagcctccccagtagctgggactacaggcatgcaacaccatgcccggggtaatttttttttttttttttgagacgaagtctcgctcttgtcccccaggcgggaatgcggtggcacgatcttggctcactgcaacctctgcatcctgggttcaagtgattctcctgcctcagccccccaagtagctgggattacaggcgcctgccaccacgcccagataatttttgtatttttagtagagatgcggttttaccatgttggccaggctggtctagaactcctgacctcaggtgatccacccgcctcagcctccaaagtgctgggattacaggcgtgagcgccgcgcctggctaatttttatatttttagtagagatgggatttcaccacgttggccaggttggtctcgaactcctgacctcaggtgatccatccgcctcagcctctcaaagtgctgggatttatgggcgtgagccaccatgccgggccgagatggccttactctgatggacaccttttggcttctatccaccactgtggtgaaaagagccagagcgagtgtgcagagagagaaggatgatgcaggcactttctagatgtttcttcatagatgaggaggagagggagacagaggagacaagaccccctgggctcttgcaagggttttgccccaaattgctgtcaacaccgatagactagtgttgacactagtctatcactagagagggagtctggggtgaaattgggggctgatttgagatattttagaagatgctggaaatgtcaaacacgggagatggagaatggcactcaggggagctgcgtggctaggagagaaatgtaggagtcggtgtggattaagtgtgggtagagaaagggccccagaagagaaggaggccagccaggaggccagagagacagagcaggagtgcagagtaaataaagggcttcaagggccaggcgcagtggctcacgcctgtaatcccagcactttgggaggctgagtcaggtggatcacctgaccctaggagtttgagatcagcctgggcaacacagtgagaccccatctctacaaaaattttaaaaattagccggggccaagcatggtggctgatacctgtaatcctagcactttgggaggccaagatgggtggatcacctgaggtcaggtgttcaagaccagcctgggccaacattgtgaaacctcatctctactaaaaaaaatacaactattagccaggtgtggtgtacacgcctgtaatcccagctactcgggaggctgaggcaggagaatcgcttgaacctggaaggcggaggttgcagtgagccgagatctcaccactgtactccagcctgggtgacagagcgagactctgtctcgaaaaaaaaaaaaaaagaagaagaaggggaggggactctctggggttagcaccaagagagccacatgggagctggacaggagtggtcttcgggatggggggaggaagatggggcacagctgggtttgaggaggacccaggaggatc

SEQ ID NO: 22656 - DNA, 118788 bp, Homo Sapiens
gaattcctggacaactggcttaaaatgttattctcttaggaaacaggacacaaacacagcttttcgccagatctacggtgctgtggggaacagtttcaggacccagaatgtcaggagatttgtaggtctctaaatgtcataaactcccacagggccagatctacatacacaccgaggtcaattggagtcatcctaactgcctgcccaaagaaacttccggttttctcagagcatgagaaagatctcgtcttgcaagagaaagatctcgtcttatacgtggtgctgtttcctgcagatcctgcttaaaacactgaagaaccttccaacaccacacacagctttaacgagaagctaatccaacacgtgtaatatattacacaataattaatttaaatgcctaagtttcaaattcactctttttgaaaattagggcaaatcccaagttttccccgcataaatatggctttcactcgcctgtattttggtgtgcctttccagcatgagataagggagtggtgacagctgacagaccaaggtctgaacgtgagagctcatcacacgttggctgacgggtacacatgtcgcagcagaaaagatgccccacctgggttataaccgataggcaacacgtatggttttagaagtttagtctaggatgattttccctgcatgggtcaccttactcttgctcttgcaaaaatcagtaaaacagctcagccaagtccaggtctaaattctcaactttttaggaaaagcattgcctccctggagaaaatagaatgtttttccttgttgatgacgttagaatcctgcctttaggattgttatgaggattctagtgcacgtttacagcatgcctgacagagtaggtgctcaatatatatatatataacttgtaaggcgagtacagctatcacagtgcctctccttttgaggaaactgagtcttagagagattcagaagcaccaagatcacagacccagtaagaagtagaaccaggctcagtgctgtggactcatagactcaaagccacagacttgccaagagaagcctggcgaggctaggacagtggccatggatagtaaagacggctaagctaacacagccatggctaacttagacctcctgacaatttaccctcagcacagaaccttctgagaaaaaaaggtgataattcaggtgggagaatggagacactttcctgagaattcttagaggagtttgaaacaaaagtctgctcacttgtgctgtttggggttggggttgtggggataactttctgaggaaaaacaaggcatggaaaacgaagcccagaggcttcaaggggtgctccctcattcacccacaaatgatctgctgtcctaggcagggcttgcaggaacctgtggtgtcaatggatccccaacaaagccctcctttaggtgaaccctctactacccagccccaagccctgcttcctcacctggctctcatctccaataattaaaaacaccctggaggaaggaagcagagaaagtgtgaaatctacaaatgaagccaaaataaaagtgcagaaaagttaacgtttaagattccccaccctccattcataaggccctgtttggggaatacaggatgcaggggaggggaaggagttatcacttaactgttggtgaacttggttggtggattaaggaatccttttgctccttggctaatttcacaatttgtcttttttttttctctctgaagcgtatctttgtagcgggtttaaatgttttctgctctgggtttaaatattttctgatcatactctgctctgattttgcaaagttcttggcatatggccacttaataatggtttctcgggttttaatcagtatcaggaaagtggggcagggcaggttgaagaagaccttattcttggaggccacgtgggtaatgccatgatccagtcactgactccccacgccatgtggccttacggacatcattgaagctttctgaatttttttatttcattacctctaaaagcaaaacaaaacatattgaatattgctttacaattatataaataaattagacatttttaaaaaagcaaacataccatgaatatttggatcatttccatctgcatggaagcttagtgcagctcctcttttaagaaaaaaaaaaagataatcccaccatcttctgctgtagagaaaagacaataactcccagaggttcttagttggaattgatccgggttaccaatgaccgatcaatgagaaaaaaaaatcagaagtttaggcatgtgtacattttatttatacatggaagacacctagagaatgagtagttctcaaagaggtggctttgaattccagcctatacagcaccctcaaagaatagtaaatttttagagaagtgacaagacaaagaaaaaggactttgagtctctactagcagcaaaaaagcaaaaaaaatggcagataagggctagccagtgaagcttgttaatgtagatttctctggtaccatctccaggctgataaacatttaaaggtgtcttcagtggttaagctttgttctccctggtagagaggggccaggttaccttttgtctttccaaatctatgccctgcttttaggcaaatggagggcgggcagagagctttcctgcatctgcttattcttaactgtcttcagctcaacaattctttatatttgggggaggcatattctggtctcccactctgccatgttttgctactttccttctcagctgaccttgcaagagggttagccatgctttctccactttctcacttctattcttatgcccccttccatccagcttgcatctctgtcactccaaaaaccactcgacaaagttgacaatgacttctatttggcaaatggcaatggacagatctttccctgtctcatcttgccctctcagaaacattcatgacagtgaatcactcttgtccctctttgcttctttgtcccatattatccttgcttttcctcctacctctcagtctagttggttcttcctcctctgtaaaatcaccagatggatgggcccatctcctttccatttctttccttagaagatttcatcaattctcatggttaaaattatccatgtgctgataatgtcaaaatatatttttcatttcagattagtcctctgagttccagactttaatatctgactacttacttgtcatctgtactttgatgtatcacaaaattaaatgtctcctctttcccatcaataactaattgtccatcaaccatcgatcatatccatctctgtaaatgacaccacactctgcctgaaccaaaaatctatcttaaatctacccatctgtctcgacctccactgccctcctggcccaagacagatcttcctggttccatctttgaccctttccatctttgctccggagcaagagtgatcttaaaatgtaaatcagagtggcatattatctgcttaaaactcttcaatggcttaagtttgttcaggatgctgtaatgaaacaccttagattaggtaatttgtaaacaacagaaatttactactcatggttctggagcctaggaagtctaagatcaagacaccggcacattcggtgtctggtgagggaccactttctcttagatggcaacttctacgtgcccttacgcagcagaaggggcaaacaagcctccatgggcctctttcataagggcccttattccattcatgagggcataaccttcccgaggccttatctctcactactcttgcattggaaattaagtatcaacatatgaatttgagggggaacattgacattcagaccatagcacttcccattgcatttagaataaacttttagcccctactaatggccctccctcacctggcttccactcattcactctctccagctgcaccccaccccactctgtccagccacatcccatcccactctctacagcccactaggctcagtccctgtgctttctcaatgcctggatttcttatttctccttttcacctgtggaaataaatgaagaccaaccaaatgacagcaagcaaaggctagctgcttaaagcttgctagaagggagttagccatcatcacttgtattttgacagagactcagagacaggaagaagagtgggacagttttacaatggaaaaagggaaagcttcacgtgtgccctgattggaggcagttggcgtaaggaagctgcaggtaggctaaaagtggggcatcctatgattggttaggggaacatgcttagccttctttgattggtccttatttatttatttatttatttatttatttatttatttatcgctcaagacagggtctcactctgtcacccagactagagtgcagtggtgcaatcttggcttactgcaaccgctgcctcctgggttcaagtgattctcctgcctcagcctcctaagtagctgggattacaggcatgcaccaccacacccggctaattttttgtatttttagtagagacagggtttcaccatgttggccaggctggtctcagactcctgacttcaagtgatccacccacctcggcctcccaaattgctggtattataggtgtgagccaccgtgcccggcagagtggtcctaatttagaaacaggaacaaaacttaggtaaactgccgtttatcttcatttagtcccctcatgtattcctgtccattttaagccaattgtcatatggattttgcttggcttctctgattgttaacaattgtgagtggtctgacttcctataaatctgacttacagaaagttgcatggctttctgggctggttaatgaaatggtttcttgggcaggttgctgcagattgtagatcagagttctatttttctatgtggtctggccatggctagtctgtatttcttttttttctttttgagacagagttttgctcttgtcacccaggctgaagcgcaatggcgcaatctcgactcactgcaacctctgcctcccgggttcaagcgattctcctgcctcagcctcctgagtagctcagattacagacatgcgccaccactcccactagttttgtatttttagtagagacagggtttctccattttggtcaggctggtctcgaactcgcgacctcaggtgatccacctgcctcggcctcccaaagtgctgggattacaggtatgagccaccgcaaccagtgcagtctgtatttcagtctctcacacctcaaggccttttcccatgttgctttctctgcataaagatctcttccctcattgatcactgatgctccttctcctctttcaggtctcagtgtaaatgtcgccttctcggggaggccttccaagaccaccatatccaaactgtgtctcttgctttgttctccacctatttcccatattgtagttgtttcatttgcaagacttgccaaaatttgtaattatttgttttacttgacatttttatccatcttcctgattagaattgaatatgccaccccaaaatatgttattttggcatatgaattattttaacctgaagataactaagaatcaatagatgcagaaagagtttcctgccctccccttatatgcgaaaagtaggacatatctccccttgaggaaggtaatcctcctttaccagagagagaagagtggctcttcttattcaagacagggaattaacaccaagataagttggtataaatggatcttactagaatagcccttgtcttcctttagtccctgatatattttctagacacttccctacaatgtgtcatcctttttagcccaagctctgtttcataccaaaaccctcttatatacctcttgaaagggcatatgagcccccaaatctaaccactattttgagttccatttctttcctgtgaactcttgtggacataaaactgtgtctcttttctcttgttaattttttctgttagtttaatttgcagcccccccacttttttttgggttttttttggggttttttttgagacagagtttcactcttgttgcccagactgaagtgcaatggcttgatctcggcccaccacaacctccgcctcccgggttcaagtgatactcctgcctcagcctcccgagtagctcagattacaggcatgcaccaccaagcttggctaattttgtatttttagtagagacagagtttctccatgttgttcaggctggtgttgaactcccgacctcaggtgatctgcctgcctcagcctcccaaagtgctgggattacaggcgtgagccaccatacctggccaaggagtttctaaagagcaatgtttgttgaggagtcagaggggtcatggaagaaaagacagaaaagggaagcaagacacagatcacagagaactttgtgtaatatacttatgagtgtaattcttatcccatgggccagcatttttcaaagcgtggcctgtatcagaattatctaactaaggtctatttgtgactcagcttcctgggctttccttccagatctattagatctaaatctttagacaatagaaagccaccgaaactatttaagatgagatggtcaaatttaaggtgaaactttagatcagttttatccctagtaaagaaagtagttgaaatctagatttaaacattttcttttctgttgctcaaaggctcattgactaaaataatacctggaccaggattccttctcagtaaaagtttaggaataccgtgaatttttgtaatgggagagggagtatcttccgggaagtaaagagctggagaatttcatcctaagcctcatcctgccccctccttagccagcttacctctcctatgattacaatacccttgtgggatgaattgagcccctcttcccccaaaaatttatatgtttatgtcctagctcccagtacttcaaaatgtaaccttatttgaagatagggtcttcatagaggtactaaaattcaaaggaggtagttggggtgggccctagtccaacatgactcatgtccctatgaaaaggtcaaatttgggccaggcgcggtggtccacccctgtaatcccaacactttgggaggctgaggcgggcggatcacgaggtcaggaattcaagaccagcctggccaacatggtaaaaccccctctctaataaaaataatacaaaaaaacttagctgggcatggtggcaggtgcctgtaatcccagctactctcaaggctgaggcaggagaatcatttgaacctgggagatggaagttgcagtgagccaagattgcgccattgcaccactccagcctgggcaacagggtaagactccatctcaacaacaaaaaaaaaagggcaaatttggaaacagtcatgtgcaaggggagagcaccacatggagatgaaagcagaaaacctggtgatgattctacaaccaaagggctgccaatgattggcccaggagagaagcatggaagagatcctccctcacagtcctcagaaggaaccaaccctgacttgatcttgaacttctgaacttcagaactgtgagacaatgtctgttgtttaagctggctagtgtgtggcactttgttacagcagcccaaggagactaatttggacaccaaaacacagacacagcctggcccctagtatataacctcagagattttacaaatgagtaataaatcaaataatgagagaactcaggctcttggtcactctagtcacggaatgtttataaataatttgtagtagccaggcgcggaggttcatgcctgcaatctcagcactttgggaggccgaggcggggggcattgcttgggcccagaagtttgagaccagcctgggtaacagagtgaaacctcatctctacaaaaaaaaaaaaaaaaaaaaatacaaaactgagctgagcacagtggtgcacatgtgtagtcccagctactcgggaagctgaggtgggaggatcacctgaacctgggaatgctgaggctacagtgaaccgtgatcgtgcaactgcactccagcctgacagagcgagaccgtgtccccaaaaaataaaaaaaaatttgtagactgggtgtggtgcctcacgcctgtaatcccagcactttgggaggctgaggcagttggatcacctgaggttaggaattccaaaacagcctggccaacactgtgaaaccccatctctactaaaaacaaaaaaagtagccaggtatgatggcaggtgcttataatcccagctactctggaggctgaggcaggagaagcacttgaactctaggagacagaggttgcagtgagccaagatcacaccacttcactccagcctgggtaaaagagcgaaattccatctcaaataataataatagtaatttgtagtgaatatatggctttccttcctttcctctgagaaacaatccctttcctactgtgctcccagcaggatgaaaatcttggtacccactgccctctcccaaaggcaagcatgtgacctaagctagtcagagaacaagtgactctggagattatttcagagctgggcatgtgactcaatccaagccaaccaggtcccaagacttctccgctggagctagcaagaaagttattcttggctttgaaatctaggtattgggaaaatgggcagctggagctgatggcagccccctaacccaggatgcatacgcaggttatccacctgcaggatgggagaaattgatcagtatgtattaggaagcagagacaggaaagagagaaagaaagagaggaaagaggatgacaacacctttagtcttcactgtgctccagccagatcaattgctgctccctgcttgtgaaagtcaataaatttcctttctgtctaagctagtttaagttatgttcttctcatttgcaggcaaaagcatactagggaattcaatgttattactcttaagaacagctgtcaataagctgtgcatagctataactgtgcttttcctagggaatccctgcagaggaacacagtgtacgtgagttactaacatctattttctttgaactattcccattgcacccgtggtttacatgggatacagaaatgttccatggtcctgcacggcacacttcgtttttaacctttcctgtcatttaagtaactccgatgcatcaagaatcatgtgaatttgtgttcagagctcagtggttccagaaaattgaagaaaacacaacaactggtgccattgtcaccctgctccacccttacccctatgcaatacctatgcctcctaaatatacatggaaaaatatcaatttatgtctcatagtgaccttgtttgaagagtgcctcagagccacctctagagatgggggatttggccttttgtagcccaccttctgttcaatgagggaagctgtgccttgaattactttgtttattggaatatatatttgagttactttgcattacttatatattggagtaaagtaattatatatttcaatataatttaataaagtagcagaaactgctgctaggtcctgagtacctatgtttattgcatcaataaatgaataagaaggcattacgggactgagattagcacccctaccccaacatctcctgccctgttgtgcctgcagagtagctctgactatgggtcgaggtacctgagcagaggtactgcagtgggtggctgggggccctggcaggtggaatgaatccttgctctgccatgaactagttacacagccttggataagttactcaagtccttgagcttcctcagctgtcaaatgaggacagtatcagtaagtccctcataagactgtagtaaggactgaattcctctaagcgtacacagtcttgacaacagttcctggcatagccaaagcctgcggagagtccaaggcaggcagggtctttgccagcctctcccactctgccaaaagccattctgcacacaggatatgttgagaaaaggacagtaaggctggagagctgtgaaaaccagggggaatgtgtatcacacacatctgtattgtgcagtgcaggatgggtggctcattcctctgcacacattttctattaaaaagaacaagaaagaaaaagaaaaatcctggcaccatccggtgtatctgtcccctgggttttgtgcagggaatggttagcgatgactaatctgatatcgaggtagcttgatcgccaaggacttaatttatgaagtgtttagtacattcctgacaaaaatcggctccaaactatggacacacgttcattcgtgccttatggctcccagctgcagtgctgcagctataaacgctcattgttggaagggtgaaggaggctgggagtggtcggaatgagtgagtgttcctacagagtggcctggagagcaaggctcccacaagacctgagggctcaaaaaaatgggcaccagcaggcacggggagggggcaggaggagggctgagggttggtcttgcctgttggaagtggcaaagaacctggggatcatcctggttgctcaccatctctggaattctgctactgacaaactgacaatagggaagaagaggcagaggtgatttacttctctacaatttgtagatagggttttgaagacctatgacttcatggggtgaatctgtttaataaaaagtatccaccatttaatagaatgcaaaaaagaaaaatgtctagaaaacaattttgcatagagcattctttctgcaggcttaggaaaggctgtttagcttgaactaactgcccagcaaatgaatgaatgaataatggacacttcctcattttgactttggtcaaactatttgccttctctaaccctctatttccacagaatagagaatagagcagcgtgccctgactgctccacaagatggttatttagcacaagcaagataacatatatggaagctctataaagcccatttcaaatgcaagggaacgccatggggtgacaatgtaatctcgtggctgtgtgaagctctgcaccagttgattacggagttggaggagctcaggtactgaaaattgtgggagcaccactggtcacctacaggccaaggcaatgtcaagttcaaataatagtgtaccccttgatcaaactttaatgagatgtaaatgaggcgttttaataaagaaatctttttggtctcttaggtgcaattttggttgagcagttatctgaattctaagatgacaaggaaatatgtacagcagctagggagtttgcagtgttgttactaaatttctctttgtttgtttgtttgtttttctaacttatggttaagcaaatttttattatgccctgactgtttttgctgacacacatcttggccatgatggggttcaggacatgctaccccaaaatatggcatgttggcatttgagaaaacagcagaatcaggaaattccctctgatttcccaccccctaactcttctttcctgaagcgggtcataggattctcattccggaggtgcccttcctgtacccagaggaaaggaactttcttgtctttgaagacacagaatcaaagaaaggaagctgaacacacagaccttgctgagtttcccccagtttattacccttagatcagaccccctttgtccaattatagttcttcacaactacccgctcttcaccaaactttgtataaaaatacacaagtttaactgtttctttgggttttcatttgcttatgaaggctcccatgtcacataaaacttatattaaataaatgtgtatgcttttctcttgtgaacctagggatgggtgaggaaaagctgtttctcctcccctacagctgtatttgaaaatgtatgcaaggctacaaggagcatttaaaaattttttttagaaagtattagttttggttccccccaggtagattctaggacaatgatttgggtgtaagttgtttacatgattgagtgacttcctgcgtgggcagctgggactttttatagaccgaatagaagatgcttcagaattgtctcttcaggaggcaaggaagctggggtatttatccaccaactcccatttatctctgcatgagagtccatcctagggataactctctggtgcttctggcaagctccagcaccgactgagaataccctagaggccaggtaaaaacactcaggcagaaacagggttttagggagggtgtattttagagtatacaggaaatacacacctacgatgcagaagaaagttttttgatttttttccagagttggtcaaaatctatgggagggtcattaacagtctactacacaaagaaagcaaataaatctagaggaagtaatggccttaaagttatcaatgacactcatcatttcctaacaccttccaacccctcttgtgacttttttcagagtctaatgtttctgcgatcatggaacctaaaagcagaagctgggcttgaaacatgcaatgaatgggggccttcagtttcagcctaggatttcctgcatcagaattagttggggccaggggttgtggctcacacctgtaaccccagaactttgggaggccgaggcaggtggattgctttagctcaggatttcaagaccagcctgggcaacacggcaaaaccacctctctacaaaatatagctgtgcatggtggtatgcccctgtggtcctacctacttaggaggctgaggtgggaggagcacttgagcccaggaggttgaggctgcaatcgtgccactgcactccaacctgggtgacagaagtctccataaaaaaaaaaaaagaatcacttacagggtgcctcaaaaatttatattcctgggtccttcccaggcttaccaaattttggttgtgggaagtgaggtatcatggtgtatgcatttataataattaagaaaaaataagtgattctcataaaaatgacttcatcttcagcccagctttctctaaacctccagctacccagcagtcacttgaaatttcatcacagcagtggaaaattgtttagccagaggcgcaacctgtaggacttaacccttgcaaggttgccggtcgagggtgcacatctgcctgggcagcccagagcaccttcagccacatgggttatggtgctgagaaaccctccttccctcacacagcaccttcctaccgggtacacctagtattgctctcctttctacctttgcagacctcagcttcctgctttgctccatccatagtcaagttccattatccatctatgctggctttgtggggagaggcagtgaaagtaacacgtggggaagggtctggcacaatgtagaactctggtggaaaaatcattttgagctctgctcaaaaactatcaatagaaaaattgaatgggtctttgtgtcttgggtctttgttatctttgttgtctgtctctttccatcttcctctttctcttttcacagtctgatgtagtttggatatttgtcccctccaaatctcatgttaaaatgtgattcccagtgttggaggtggggcctgatgggagatgtttgggtcagaggacggattcctcatgaacggtttggtaccgtcctcgtggtaatgagtgagttctcaccctattagttcccctgagatccaattgttaaaaagagcctggcacctcttcctctctctctttcctcctctcccactatgtgacgcctgctcccctttcacatgaatggaagcatgctgaggccttccccagaagcagatgctggcgctctgcttcctgtacagcctgcagaactgtgagccaaataaacctcttttctttatgcattacccattctcaggtattcctttatagcaacacaaaacagactaagacatactctctacctcccctctgctacccccatccttccgtaacatttcttctggtttctgactcccttcaacccatccctcctcctccttctttatatgactataatttattactaaattatttgtgactctgtcattcctattaaacatcattttatctttctttcaattacaaagcatgtaagacatttcatatttatgcctttgtctcaaactactcttctttgacatctgtgttctaaagtttctttttaatgtatggagctctcaatttgttcttcctagtcactgagtattaggaggaaagaaacgtttctgaatatactactgtgtgcacacacgcacacgcatgcacacacacacacacacatcagagtgtctcggggcagtgcctttctggacattaggtaaagaaccatgaactctcaacctcaccaacctgtttttgtttttgtcattcacttaccaatttcatacatacctaaagatgattaagtaaagagagcaaatctaagagacttttgttccaactcgagaaaaaaactgatgttgcttttacattatgtgggaggccgaggaggtaaaatgaggatcaagctggattccacattgcaaactgaatctcctctgaagcctggcccgtgccgtgaggggagaattatcctttgctcatgtgatactgctgtgagcctgaattttgatttaaagaatgtgccatcattcagaaatgtcagtttgtttgtagctctctttacatggaagtctataaattaaggaagagttaaggaggaaaagggggatctggataggagcgaaaagggtgagttgtgatgtctaaaaggaacaagtgctgagtctttgatgatgtatagcttataaaacaagaaaagaacagagccaggaggacatcaaaaggctttcctggcacaatgcctgtgatgttaggtgcctcgggagcccaggaactctgtagactagacacaggttctcccaggcccatcttatatcctagggccatatcaatgggcacttctattttagagatgaggaagttgaggactggggatgaccgtgggaactactagtgggaggtctccttggctttagatttatgggctatgtctagtacttagagccacccatgctttagtagtcaatttataaggagcaataagaagacttcctagaaactgggagaggaaggtcaggaagtcacgggaggtgatgtggccaatttgaaggagaaggtgaattcacccggagcatttctaaccttcccaatttcccttcccagcccatacctcaaaatggggaagacactgcaggtcacattattatgcctccctcctttccatgcaaagtcagagaaacggagatgggaggggaagggtttaattggccaagcagtggttacatgcctgtctaccacactaggcctagaaaatgaaagaagggattcactcagaaagctcgtttctctactcaactatcaggagaaaaggagaaggcattttggtataaatacaagtacactagttttatttttatgtatttggtttttttagatacagggtcttgatctgttgcccaggcttgagtgcagtggcaccatcatagctctctgcagcctcaacctcctgggctcaagtgatcctcccatctcagcctcccaagtgtcactactggcacacactaccaccctggctaattgctttaatttttactttttagagacagagactcactatgttgcccaggctggtcttgaactcctggcctcaagcaagcctcctgcctcggcctcccaaagtgctgggattacaaacataagccactgttccgagcctgcactagttttaataccactactcaattcagcccttatagccacattgagagcatacacaaagacacacactctccctttctctctctctctcacacacccacacacacatatgtacacacacactcactgttcacaaatccaggacattcaaaaaagaatggagaaacataaaatatggaattgagttttcaggccacattgccatatatgaagactttgtgcaaattagagaaagacatactatccccaatgagcagatgcccagcttcgtgattggttactgtccttgtgctacaaaaacgatgcttcttcctccttgtggacacgacctgtgacagagtgtgtagtgtcaagaatagtgtatgtaggctgaatatgagtgccaacagatcccctctgctggcacatatgaaatatccaaactgcccatggatacatggaagccttgaatgttggaaccaggcccaaattttactccattacctggacttgacctttcctcttctttctgtctgtctatgcttcccaaaaggcccaggtgtaactcagcctgaaatatatgtctgcctgaaatcaggtctggcattagtctttcacttttagtaagtccgagagcatcaccgcaggcaacaggtggaggcggggaagagactccacaaagaagaaaagggatttttctaacattgaagacggcatcttatcccctgtcctgcctccccatgaaatcctcaaatggtgaacatggctggaagttaaagtaaacacagacacgtgtgtaaccacaacaatagaccaagaaagactatatatctgaaagcaagacaagtcccaagccatctgctcatttattcaacaaatgtttgttgaatctctgatatgtgcccagggatgtgatagaagccatggaaagagatgcttacacaatctctgtctcaagcattatcagggcttaattactccaaggtaaaccaaggagggctcttgtgcccgaacaaagtatcccaacagggccctccctggcatcacctccaatctgagttggaatctcctgagccacacaaaccaggatggcttgaggctgggcagatggcattgggtgggcggctctggccagccattgacaagaatttctttgccaatttcccgttccattaataatacctcagtaatgaggcagaagatgcctgaggtgggtggaagaacaagatgggtgtggtaggatgtgggaaggttttccgtgaaacatcaagaacttttccaagccagaaatcagaatggagctttgggggcatttgctctgatgtggtgatgtgtgtctgtacaacagagaaaagatgttattcttccccaaattaaagttagaggcaacttggaagctgccactcctttttcattttgaggagagctggattctgttcaaatcaaatacaaccaagggggacgccaagggagacgccagggaatgcaccttcgtccctatctggaggcggggttggccagtgccccagcttctgggtctggtttgggtttagtcactcacggctctgctcccctgcctagaaggctgctcaaatcagttgacctgagccgcatgctacctcctaccaagaatctttcaaaaacatgcgctcaccacatggcagctaattctactggaaacagcgggcgagactaggaaataattcacacaatccccagcctagccctctcttaaggcagtataagcctcagggtcatagctgtgctgaagagaaatcaatatcacatggtgtagtgtgtgcgtcttatcccaagcttcccaaagcaattactacaggagagtgcacatgtgcacacacatgcacacacacaaaacctgtgccctttgcaaactacctggtttcttgtctgtttttcaagaggaagaaagggtgctagattggatctttgttttcctgacattttcttcttggtaaataccccgtggctcataaatatgacaccatggcttaaaacagaccctgaggaaaaaaagggaagagtagtctgagccagaagaggcgaatgctaacactggtgatacctcactgacttccctctaatgtctttcttctgctggacagctgccccaggagcccacgtggagctgtgagaagtgccttaagactgacctggcttcaagctctagtcttcccacggtgacaggagcgcttgagttgatgctatctaagatcccttccaactctgatattttacgagtctgtgattccctaagatttgtaaaactgacatagggtcttttatgcacataaaaagacacagagcctttaactcaacaattccactcttagaaatatatcctaaaaagataatccaacatgtgtgcaaagctgtaggtacaaaaatgttcgttgcagtgttatttatgacagcaaagagttaggaaaccttggtattcagcaataaaagattagttaactcagcatttcccaaagtgtattctgtgatatgaatgggtattaatagaaaagacaaaaaaaagaagaacaggaagagatcgtagcataccatggtcataaatgttaaagaaacatcaccataaacaaagaatacagtcaaaaaattattttactcaggaacttcctttgccttttatacagcatatattaagcactcaataaaatttgtcaaatgattgaacagatgaatggatatttgtagttggtaaaaatgctatttgcttcattttaaaaaaattcttttttttgagacagggtgtggctttagcgcccaggctgcagtgcagtggcatgatctcggctcactgcaacctccgcctcccaggttaaagtgatcttcccacctcagtcttccgagtagcttggactacaggtgcatgccaccatgtctggctaatttgtatgtgtgtgtgtgtgtgtgtgtgtgtgttttgtagagatgaagtctcactttgttgctcaggctggtcatgaacccctgagttcaagcaatccgtcttccttggccttccaaaatgctgggattacaggcctgagccactgcgcctggcatgtttgcttcattgttttaagtcatggaatatgatgtctcccaggatggtatagtaatcatttaaagagcataaaggggccaggtgcggtggctcacgcctgtaatcccagcactttgggaggccgaggcgggtagatcacaaggtcaggagttcaagaccagcctggctaacatggtgaaaccccatctctactaaaaatacaaaaattagccgggtgtggtggcatgcacctgtattcccagctacttgggaggctgaggcaggagaattgctcgaacccaggaggcagaggttgcagtgagctgagactgcgccactgcactccagcctggccacagagcgagactccatctcaaaaaaataaataaaaataaataaaaagggcataaagggtaggaattagattattatttcagactttatttatttatggctttttttccaggaaaatattttaggtggatgagcaggatttaccttataaaattcctggaggtcaagatatcctgtctctggcactttctggatgcagaacctcggcctggagaacaggcgagcagcataagatgttgttcatgcacctactgaacaagcctcatctgttttctataaaaatgattagttcagaatggaagtgtatatttgtttggaatcccagatctcagagtcttcagctaacacctactgacactgcaactattcacaggcaatatgtacattctaaataagacaagggatatttatattatttatgactctgagcctttattcccagactcttcagaatcagattcctggtgagctgggctggaccgcatgcgagttaaaaaaggcttctttgtgctcctggccttgcttaatctaaaagtatgtttgtggcagaatcaagagtttataaatgtcttaacaaactggagcttaagacctaaagcaaaaaagttattggccacagtaataatacctaacatctattgagttcttagggcatgccagcattgtcctaagtgactttatatggattaactcatcattcttacagcaatactacaagtgtcgagtactactgagtcaactgagtatcacttttttacagttgagaaaaaccgaagaacagagaggtgaaacgacttgcccaaggtcacacagctaatgataaaactaggatttagcagtctgtgtacagaatctacactctcagacatggcatgatatggtctcttaaattgctcctagattatttaaaacaaataaacaaataaaaaacattgttctattgcaaattcacagtatagatgggtgaccttttagatagagaactcacctgattagctaccacctagatcacaaaatagagcatcagccacggtgcagaagcctgctgtataattacctctccaaaggtaatcattcttttgaccttcatcaccataagttagttttgcctgtttttgaactttatgtaagtgggattataacgtgtatgctgctttcagtctgtttttcttctattcaccattaaatctgtaaggtttatccatgttgtggagtgtgtagcagttgctggtccttcttcatgtacgtctcactgcaggtttttgtgcaacctgcaagctaataacagtttttatattttttaatagtcaaaaaaaaacaaagaaaaagaatattttctaaagtggattgtatggaattcaaatttcaatatccatagataaagttctagaagcacagccgtgttcacttatgtatcctctgtggctgctttcattcttcaaaagcagagatgagttgttgtgacagagactgaatggcctgcaaagtctaaaagatttaccatctgatcttttacagaaaaagtttaccaaacctactatgtagtcttccatggtgtgaatgaattataatttattagtttattagtcatttagttgttgatagacatttaggttgtttccaatggtaatggggggtggggttataagaaacagtgatgttataggcacccatggatatgtcttttggtacacacatacacatttctgttaatatactgaaatatggaactgctgtgtctcagaagattcatatgtttctcaaagtgggtgcaccaatttacactgtcagcagtaacgcaactggcaactctgtcataaatcaggtgaccaaatatgtgtgaatctgtttctggactctctactccattggtcatattaataacctacaggcttaattactatggttttagtagtacatctaatatgatccattgatcatattagtaacccatagccttaggtactatagttttaaatacatcttaaagtttagtacatcttactcatctttgacgttggctattcttagctctgtttatttccatataaattttatttatttatttatttatgtatttattgagatggagtctctgtcacccaagctggagtgcagtggtatgatctcagctcattgcagcctccgcctcccaggttcaagcaattctctgcctcagcctctcaagtaactgggattacaggcatgcacctctacatctggctaatttttgtctttttagtacagatggagttttgtcgtgttgcccaggctggtctcaaactcctggcctcaagtgatccacccaccttggccactcacgcccggccccatatgtattgtagaatcagcttgtcaatttccacaactataaaatctgctgggatgtgactggtattggattaaatatatatgaatttcaagaaaacaagatataacaactttgactctttcagtccataaacttggcatttccttccatttatcatcagtaactgtgtgtagtcttctgtgtaggagtctcgagtatctttcattggcatttcctaggcatttgatgtttttgatgctcttttgaatgacaactctccattaattctccaaactaacaaacaacctctgtacacaaaaccctgagcacccacagaacatccttctgcaagtcctcttttcatcccctctcttgtgagatgctcttcttgcttttccaacttaccaggatcctgattatatttgaaatccagaaaaaaaaatatatctcttacttgaaatcctctcaggggccaggagcagaagctcatgtttgtaattccagcactttgggaggctgaagcatgaggattgcttgagtccagaagtttgaaaccagcctgggaagcatagggagacctcatctcttaaaaaaattttttttaagcagctgggcatggtggtatgcacccgtagtcccaggaggctgaggactgggaggctgaggtgggagaatcacttgagcctaggaggttgaggctgaggctgctgtgagccacgaccatgccactgcactccagcctgggcaacagagccagatgctgtctccaaaaaagaggggagtggaggggggtgggtgggagaaataaatcctctcagaccctgacatactttggatatttgtcccctccaaatctcatgttgaaatgtgacttccactgttagaaatggggcctactggaagtgttagatgatgcgggtggatccctcatgaatggcttagcacaattcccttggtgatgagtcagttcttgctcacttagttcacacaagatctggttgtttaaaagagcctgggacgtctcccttctctgtcttgccctctctcttgccatgtgacaggctggctcctcttcaccttctgccatgattggaagctttctgaagccctcaccagatacaggcactatactttgtgtacagcctgcagaaccatgagccaattaaaactctcttctttataaattatccagcctcaggtattcctttacagtaacacaaaatggactaatatagacccctacgatcccacagtaatgcctccagttagtggtaattaatatcctttttgcttatttgccaagtaatgaccctctgctgcttcacctctcttgggagtaaattgttaaggaagttttcaatgtcaatacacgacttttaatatcttgtctcttcaaatacagtgcacattcaccaaagacaaatataccttatttttcactttcagtgtccctcaaatattcttccagagtagtgtgttcagaaggaatttaatgttagctccttgtttgattgaattctagcttcatttccctgagcatagtttagctgaagattgatgcaaacctgttactatttcctgttctttctgtaattgattcatatatcatacagagtaattcacggatttaaaatctcataatgctttaaagttaagcttttcagtaaattaatatttttgttttctttccttcttcttactttttgagggaagaggtaggcaggtaggtcaaaaagagctttgagagaaaaaaaacatttcattatttagccctttttgttagctcattaagtccttttgaatgaggtcatgaaatgatagaagatgcaaatctgttatccataatttgcagttgttgacatgcaagaccctgcgtgtattaataaatcagttttccaaatgccaagcggcatttttttggctcataaatagcagtggtggcctgtgtgacccaaataatttgtttcttcagttggaaagtccctagatgcagtcaggcaagtttagaaaagagaaaggctgaaatacagagagaagtcagagggaaatgttcagattgaaactggaacctatttggctcccacactgtcttccatgattgtgatcgggacaaatgaggggagaataaaaattagaaagacagagttttcgacaaaggggacttcatggagagtctgtacactctccatgtacagacatttggggctcatgttttgtttaaaaaaaacgtcatccacaacaaccagcctgatccctcaaaatgctcccagcagctggctcctagagataaacagtggtatttcacagtctaatactaatcatatttgggcatttcaagtcagattggaacacgcatttcttttttcatagtgtttatttttaagtccaaagcaagaacttgttatgtatgtgaaagatccccctgaatctaaaatacaacacagagggagagagaagggagaacgcagcaccaggtgggaatgagaacttgaaagaacacttgtccctatttccaacagaactccatcattaacactggaattcttatacaaatccagacagccccagctgatacccacatgagggtggaggctactaccaaggtaccagccctctggggaggaatggagtttaaagaccaacaatgatggccaggcgtggtggctcacgcctgtattcccagcactttgggaggccaaggcaggcagatcacctgaggtcaggagttcaagaccagtttggccaacatggtgaaaccctgtctctgctaaaaatacaaaaattagtcgggcatggtggcaggtgcctgtaatcccagctactcaggaggctgaggcaggagaatcatttgaacctgggaggcagaggttgcagtgagccgagatcatgccattgcactccagcctgggggacaagagcgagactttgtctcaaaaaaaaaaaacaaaaaaacaaaaaaccagtgatgtcccaggatgttctagggtgtcaccgagaggaggatccaagggagagaggacacattctgagtcatgatgagcatctttattccttcgccaaaccccctagtccaccccgcaaagcaaactccctcttcaataagcaatcataattcgacatattttgtgcatcatttccttgggccattattggaaaagaaactgtagtctataccagttagactcagttactgattaacttccttttcttgaaacaatttctttccaatcttgtctactttatagatctcacatgtttttcttcaagtatattaaactgggtatgaggcaatggctttagactaaaaacaaactcacatccttacattaggtcaaagtgcaggttaccaacagttggtcatctttaacctcactgtcccttactattccagcttttccttccaaaccacctccctaatcttcattccccaatcccaagcccacaggaaatcagagggtgaaaaaaaaaatcctcatttgttaatcccatttacagcaacacagacataacttgatgcatttatgcctttgtctatgcttttctcttttgcctagaattctttcatctctaccactgtgtgttgaactgctagttcaactgtgccaactctcacctttccagggaaaattctcctaaaattagtatgaagaaaagtctctctctccattgtggtctcttatggtcctcaatataccacaattgtgatcctcagcaaataatcaaataattatgagtcaatttagtgttcacttctactagactgtgagtacaacaggaaaaaatattatttcacggacatcgctacatccataatctctagaactatacctggcatgcagtggatacataatagaatacaggtggatgaatgggcggattcacaggctgcatagatggagctagaggaagattagtgtaccagttttctcttcttgccgtataatggagtttgactccatttcttgctgtttgactattgacattatttaagcctcactccaccttattcctttactgccccacaccttggcaagctgctaagaaagcttgggtgctctctcctttggagccaatggaactatcaaaccacgcatgggaaccttcactccttccctaccacctaactaccacaatattcccaagccagtctcctttctctgctttttcaagccatttctggacctgcgtggaagccatactgaaagacttattatgtaagtaagaaaccttttaataccctgttggcacatgtgtatagtggaggcatcatcatcaggcttgacatctgaaccaaattttcagtaggggcccaccctgtctctgaggagaagctgtaacatgctatagcagcaaaaaataaaaataaaacacaaatatagtgactcaaaacaagaccaatgtattatcttacagttctgtaggttcaaagtccaacataggtttcaccagtctaaaaccaaggcatcagcaagtctgcatccctttctggaagttctaggaaaaaaaaaacccatttccatgctttctccagcttctagaggctccctgaattttttggatttcagtccctttctgcatcttcaaagccagcaaagttgcatttctctaaccctgcttccattattgcttctctctctctctctctctctctccctttccccctacccctctctctctctcccccccctttctttctctctctctctctctctctccctttccccctacccctctctctctctccccctccctttctttctctctctctctcaacctgaccacagtctgagagggttttccacttttaaggactcacaattagattaggcccacctgaataatccaggataccctttctacctcaaggtctgtacccttaccttcatcaatcacatttgcaaagtttgttttgccagataacatgaaatattcacattttctgaggattaagacacaaatatctgcccatcgcagtaagcttaaaaaacaaaacaaaacaaaaaaaagcacttgtcagtcctttgctctagctatgaggttagtctttacagaaatgcaatgaaattggaattgggaaagtcccagtaaacaacaacaaaaactcatgatctatagcataatggagttggaagggaagggaagggaagggaagattgctgtttttttgagtaaggataatagctcaccctccaccacttcttcctgcgacaaacaagtaccatgagaaagatggcagaagcgatactataaatcctcacttaatgttgttgataggttcttggaaactacaacgtaagcaacacgacaaagaaccaaacaatttttttttctcatcaacatgataacaaagtaaagaccttgaaggaaacgatgttattcaaggacctgctatatgttgctttgcttcaaatcagtttccaagaacgtattgaggatgctgagggaggctactgtacttgcagcaaaccaggaccactagcttcaggtgtgccctggtgaatccagccaaagagcctgtgcagtctagtgaaacacctaccctgtggcaagtgcaggaataggcagtgtgaaaagaataaatagatatttcatctttttccctggttcctggcacacagctcctaaaaccctcgtcttttctatgctaaagaaattcaaaagtggccaggcgtggttgctcacacctgtaatcccagcactttgggaggctgaggtgggtggatcacctgaggtcaggagtttgtgaccagcctggccaacgtggtgaaactctgtctctactaaaaatacaaaaaaaattagcctggcatggtggcacacacctgtagtccctgctattcgggaggctaaggcaggagaattgcttgaacctgggaggcagaggtttcagtgagccgagatcacgccactgcactccagcctgggtgacagagtgagactctgtctcaaaaaaaaaaaaaaatgcaaaagcaagtgtcctttgtatgctaatgagatatctagtagcttagggctcctagatagctttaggatgtggattggtggccggaaagactctgatgtgattacagggttgaaactttcagtcccatcctctgatcgccactggctggagactgagtcaatcttcaatggttaatgatttaatcaatcatgtctacataatgaaccttccataaaaacccctaaacaagggggatttggagagtttttatgtggtgacacgctgagatgttgagagggtggcacaccaagaaagggcatggaagctccatgtcccatccccataccttgccctaagcatcaagagatagaagaccatgtgtctgttgtaccctaagtaaagctctttcctgagttctgagaggcattctagcaaattatggaacatgagaactgggtggtgggagcaggctgtttgcagcctgttggtcagaagtacaggtagaaacttggaacgtgcaattggtgtctgaacttggggtagtcttgtgggactgagtcttgacctgtggggtctctgccaactccaggtagttgtggcataattgaattgcaggacacatagctggtgtaaggaaaaccagagaatgggtttggaggtagaagaaaaatcccacacatttggcatcagaagtattatgagtaaaacagctaagaggcaagtagattggaagcccaaaaacctaggtttaactctcttgttgagagcagcaagaggcagacaaatgcctaggcagacagggtcaggtccccggtgaaactccaccttcaagccaaaaacagcctggactgctggttccgggtgaaacctgtgacccagagtgagaacttctgttcctgtttgtctgccctttcccaattggttctttctgaataatgccttttaaacaatcaaatgttatcctttttaatactacctatggtctctccctcacccatcctgcacctataaaaatccccagactcagccacactgaaagagacaacctggcctttccatcccctctctgctgacagcagtttcattgctcaataaaattctccgacctcaacacccttcagttgtcagcatgacctcattcttcttggatgcgggacaagagctcaggatgcaccaaacacgggcacccagaaaggctgtaagactggccttctaccctcgctggtagagtgcagccaccccacatgatggaagaagaggcagggccaagccggtcctgcagccatctattgggctgcagacagtggaactaaaagagctagttagcacactgtaatactccctctggggcttcaggattgcaggcacacctgcctgagtgcaactgtgttcccctcagggcaacatgcctggtctggcctcaggccccacacggagcctgctcctgtgtcagggcttgcaacggccagctgaaccccacccttgctcactcacaaactccctcccaccaggagctgagtgtgtagttgcatgactacaggaactgtgggccagagcacaagccagatgcagcccagagaactgaatagactgggtgccccccgctgcaagcctggcaaagggtccaagacaaatcctgtgtcatagtttatcattcattagttgtgtgccctttgacaaatcatctagtttctctttgcctgagttgccccatctgtaatatgggtataatatttgccttacatttttttaatataatagaatttttagagtgtaaagagttacttcacaaatgtaagtcattgccattataataaatcagaacactatgatggaatacagagaaccccgaaccaggtacaagaaaccaatcctgccaattattaattgggtaatcttgagcaaaccaactaatttctctctgtccagcattctccatatccaagtgggggattacattacattatttcttttagtccctttttcgctaaaattttcattttcagcactgaatcattattttcagcacatgcggtagcccatctaaagtgctggttcttgatcttgtggcctgaatacattttatgacccctttatttttagctctggtggcctttttgatgggtttgactcagcagaagtacaagttagaagcagttgcttgatcccaggcctggttgcctgattgaaagaacatattaagcatgtgcctaattccgtaaccaccattttattgcactgaatgcttgtgctcagcaaagcagccattgtcattctcaaagaatatgtctagagaacttcagcatactatgaatgcaaaagaggggagctagactggactcggtggctcacgcctgtaatcccagcactttgcgagtccaaggccggtggatcacctgaagtcaggagttcgagaccaccctggccaacatggcaaaatgccgtctctactaaaaatacaaaaaattagcagggcgtattggtggatgcctgtaatcccagctacacgggaggctgaggcaggagaatcacttgaaccgggaggcagaggttgcagtgagctgagatcacaccactgcactccagcctgggcgacaaagtgacactctatctcaaaagaaaaagaaaactaaaaaaggagtgggagctaggatttgaattctgcccctactgatactacttaggaggtatgtgatcttggacctcgctaaaattctgagcctcatctgaagagtatatggaataatattacctctcccacttttcttcatctcatttaattttttggcagtactgcatggagtttataaacttatacatgctgtaaagaagaaggagagacaggcgagggatgtggagaaagaaggagaagaaaatagaagaccaacttctactgtttccagccatagcttttgattcatggttccagctcatttgatgggtacaattccattatttagggtttccactgtgttatctacaaatacaatgaacctaaaatttgccttcaaacatgccataaataaaaacgtcctatatgacagggccctgtggttcagcactaaaataatctcccagattgatgctaatctttgttcttcatatttggaacccaggtgttcaatggcatgcaattctttctcattacattatcaccaatctgtaattttctatcttatctacatggagagactttgcatgcataactcagaaaccttactcaaattcaatgaagtgattaagcaagatgttggttaatatgcagtaggattccagtacttccttgatagaactagcctagtaatcccattaaagcaatgggtccagtcgggaacacactcataactaatacatggccatttttatttgtaagtgctcaaaaagccatcaaatgccctgctcagcaggcctcatcaaaggccaaaggtctcaagctaaaggactggtccagcctcattagacaataattgctctctagctcacagggatggttactttttgaggtatccccttttgaaaatctgttcacttgctcctctccagtcttccactttccctgcatttcccacaacccctcaatgtgccctagtagtcgttccattacaaacacctctaggaattttagaaaaacaggaagaagtttcagatgaccaggacaggatcaatcttaagctcttactggacccacactcaggaatttttgtgtagaaaacaaggattaaaactagtcaactcttttcccccagagagggaaagacggcgatggaagttttaagaaatttatctgatatttatttggtacaaaatgcttttcacagatgtaaacattaatcaaattcatatgttaattatccaactctctatttcccttcatttgaatcttctcaagatgcctcctgtctcaggcaaggagacagaattgccagcagtttggcatatgagaagtctagctcctaggacagctctgggtgcggctggcttcttggtgatgttaaccagagttggctgctgggatctttgaggatcaaaaggaatttttaaaaattgtacataagcccagaagaaagcctataaaatcacttccttgtgtctgtgggttccacccattaatagcctgccaaacccaaatacctgaaaggaagcagggtacagagagaaagaaggagaagctgactctggaggaaaaatgaattaatccccaaattctgaattcattcctgtgtacaccatttgtatatgcttttagggagatagttaaataatcttcttctatgctcccagctaatatttatcatccattttgtaagaaactagctgctcagtgagggtctaggaggagaaaaatgggaagagaaatagaaagactgagcaaatttgaagaaagttaattcattcttttgcatttacaaaaggcagtaaattctttcagtttctcatttggtccccaatcttttttccagcaaaggttaaattgtggggctttatttttgttttgtcccagtaaatatcatgactatgaatattaacaaggcatagttgtttcccttctctactctgctgacctcattaaaccatccaagataagctccagtttgtaggtgggctacatcaaatcaaattcagtcacaaaatccacttattttccatacaacttcactgtggaagaatgggctgtttattggcagactaagcaacccactcccacaagtctctgcgtctttgcataatcgttcccatcactagtatgccctctcctgcccacccagaaaattcttgccaatctctcatgacttcagaactctgggaggccagtcctaactccaccatctctatagccccatgtccccacccttaaacaagccctcaagccccctgccttcctgcaccagcacttctctctctatgttttcgtcaactttgtatgttctggaataatattcctcacactcctggttttctcagttatgaagactcaaaggcaaaatccacattttacccatcttatttttactagcaccagccagtgatggttgaatgaatggagagcttccgtcagaaaaagctcagccccattcttcatctcattacaaactctaaacctcattctttgctttcaatgaggccagacagcccaggcataatggacataataaaaggatagcgccataatctatgcacataggtagctctatgagtggtttatacatgaagcctcaatgcagttatcttccactgcctgtttctgtatctgtttctccctccttcaacacataagtaacatcatatccaaaatgaagatagttagaattgaggcatattaaataagagcctctaggcatgctcaacaaatgtctgttgaatgaattaattgaatgagggaatgagtgaataaaagcagtgttatcaagagcaagtatgcaagatgctggggtaattttctgcaatagtctctatgatatatatgctgaatggggcacaaatgcttaatatatgttagtcatcatcatcatcaacagtgcctggtattttcatttagaaatgactctattaccattaaagtctagatgtccacaattaccattattatttaacgttctgggagttccagccaatgcaatcagacaagcaataatagcagctgtatatgccagctaattggttatgtgctttatagacaatatttcatttaatcctcctaagatctccataaagtaggtattattattcctctttgaggaaactgaccctcagagattggataaattgcagaaggttcaagttaataggtggtgcagctgaaatttagcccaggtctgtctgtctcaaacacctatttttttttagcactatactatattggtctataagaaaaagaagtaaaaattctaaatattgacaaacatttcttgcaaataatatgattatctctttgcaaagcccaagatatccaacttaaaaatgattatagctaatataaatatacaaagctattaaagttaattataaaataaatacctaacatttataccttgcctatatattcttaataatatgttcagaaatacaatggagggctgggcatagtggctcatgcctgtaatcttaacactttgggagactgaggcagggggatcttttgagcccaggactttgagactagcctaggcaacatggtctgtctctacaaaaaatccaaaaattagctgggtgtggtggttcctgtagttccagctacttggggggctgaggtgggaggactgcttgagcctgggaggtcaaggctgcagtgagctgtcattgtaccaatgtactccatcccagggcaacagagcaagatcctatctcaaaaaaaaaacaaagaaatataatgacattttaaaatctcacttataaaagcaatttaaaaatgtttaatatcatatcatgtgcctccgtccaggagatttcctattatggctcccagcctaattccccattactccccagaagccagggccaagtacgtctttttttttttttttttttttttttcaggtaacgtcttgctctgtcacccaggcagaagaacaatcacagttcactgcagcttccacctcctggactcaagtgattctccctcccatctccgcctcccgagtagctgagatcacaggtgtgcaccaccatgcccagctaatttttgatttttttttttttgtagagctggagtttcgctgtattttccaggctagccttgaatcctgggctcaggcaatccacctgcctcagcctcccaaagtgctgagattacaggctgagccaccgagcccagtaccaagtatgtactgaagaaaatttatccaagtttttggcaaagtgggagtgaaattcataagtaatattcagggcctagatgatggaaaaaaactaaaaaaaatttactgagagatataaaaaatgaaaataagcaaaaaagtataccatatttctgaaggggaaatttaatattgatagaaaccaatttttcacaaatttagttttacatttaacaatgtcagtggaaactttgacagggccattttctaaaattttaaccaaataattttaacattcatacggaaggagatgcatgctataaaagccaaaactattttggaaaagaagagttacaaaaaggacttgccacaccaatattaatatgtgacacatagtacaaataattaaagcaatatgttacttgtgccaaattagaaagacagtaatgaactagaataggaaatattatatatatatatatatatatatatatatatatatatatagtattctataagggtgaaatttaaaatcagtagaaatagaataaatcattcaacaaattgggaaaaactggctaaccatttagaaggtaaatgtaaataaccaccgaactcataccacaccctaaataaattccagatgtattaaatgttttaggtgttaaaaaagtaaaccataaaacagtaaatatttatgtgtaatttttagcaggatagagctaaagtatcttatcaaaagcagaaatctaaaaggaaaacactgtgaaattcaactaaatatgattttataatattcgtaagtttaaaaatgaaaagcaaatgataaacacaaaaagcttttgtatgttatgtggtaaagacttgacccctccatatataaagatcttgtatgaatcgaggccggatacggtggctcatgcctgtaatcccagcactttgggaggccaaggtgggcagatcacttcaggtcaggagttcacgaccagcctggccaacatggtgaaaccccatctctactaaaaatacaacattagccaggggtggtgtcgtgtgcttgtagtcccagctactcgagaggctgaggcaggagaattgcttgaacccaggaggcagaggttgtggtaagccaagatcgcaccactgcactccagcctgggtgacagagcaagatcctgtctcaaaaaaaaaaaaatcttgtatgactcaatttagaaaaggatatacattttggttaaaaactcggcaaaagcaagtcacaaaaaaaatacaagtggttataaatcctactagaaatccaagagttgcaaagcaaaacatctttgggataatgctgcttcaagtgtcaaaatgacaacaaatttctcaattgttgtctagtttaggataagaagcacttccataccttacttttgagaagtgtcaatctaagcagtctttctggaaagcaattttgtactaggaatgaaaaatgtgtaaaaaccgcaatctgctccagtagtaatagtaaagaagtaatcacacatgcaaataaacattgagtcaggagaatcacttgaacccaggaggcagaggttgctgtgagccgagatcaagccattgcactccagcctggaaaacaagagtaaaactccctctcaaaaaaaaggtttatggagtcattgttataatagtgacaaactagaaataacttgaatttccaactttagagaaatggtttttagaaagtgattacaggccgggcgcagtgggtcatgcctgtaatcccagcactttgggagtccaaggtgggtagtccacgaggtcaagagattgagaccatcctggccaacatggtgaaactctgtctctactaaaaatacaaaaattagcttggcatggtggcgcatgcctgtagtcccagctactcaggaagctgaggcaggagaatcacttgaacccgggaggcagaggttgcaatgagcagagatcgagccactgcactttagcccggcgacagagtgagactcagtctcaccaaaaaaaagaaaaaaaagtgattgattatagatgtacacaatggaatattatgcagtcattaaaaatgatactacacagtcatattttataacacgaaaagatggtcacagtgagtaaagattattaggactatagctacggtaatgctgtccagcagaactttctgtgttaatgaaaatgttctttatctgtatttcccaaaagccatgtacaacttctgagcacctgaagtgtggctactacaaatgagagactgaattttaattttgattttagttttttttctattctaatttgaagagctatatgtggctagtggctaccatattgaactgtgcagactgatggtatgagactattttacctccaaatatatgtacaataataatattggaaagacatacagcagaatgtaaacaatggtcatccctcgggagtggggctatggttgtttcagttttaaatgtgtttaaatatggaagggttttttttttattaattaattaatttatttattttgagacagagtctcactctgtcacccaggctggagtgcagtggcgtgatcttggctcactgcaacctccacctcccgggttgaagggattctcctgcctcagcctcccgagtagctgggattacaggtgcctgacatcgcacctggctattttttgtagttttagtgaagatgggtttcaccatcttggccaggctggtcttaaactcctgacctcatgatccacccgccttggcctcccaaagtgctgggattacaggcatgagccaccgcgcccggctgcaaggggttattttttaaatgggagtacaatgtgcttcaaactgctttgaaaacactgttctgtgtggagagtggtgaaaacttcgggccggtcacatgggtccctgagggtttgcctgaccacccaggctgaatcatatttaattggagccccaaatgtccccaaaggatcattccagatgtcacggactcatgtctcggcacaccaaggatcacttccccagtcgcagccctgggctttggtcaatgttattttcctaaaagttttcatacctgatgggcagagttaagagaaacttgtgtgtctgatggggcaggaggcctggttttaatagaggccatgccgccggttgtgggatcagcactccttctcacccaccgtcaaagcttttcatcacttcatgtgccccaatccggagagatttgcttcccattatggctccaagcctagttctctatcccaggagccaggcatcggcacaccttgtggatgaaaaattatccaagctgctagtgcagtgggagaactaatccttccaccatgggtagctcaaggtacttaagaaatcctctggtactgcaggaatcgccatgagagaagttgtcccagatgcccacatctaggggcacctaaggcccatcgcatcatactgcttatgtcctcatttgtctgtgctccaccccaagaccagcaagaaataaatgaggcagacttttcacaatctttgactcttactgttttttttttttgttttttttagacagagttttgctcttgtcgcccaggctggagtacagtggggccatctcggctcactgcaacctctgcctcccaggttcaagcaattctcctgcctcagcctcctgagtagctgggattacaggcgcccgccaacacgcccagctaagttttgtattttcagtagagactgggtttcaccatgctggccaggctggtctggaacttctgacctcaggtgatccacccgcctcagctcccaaagtgttgggattacaggcttgagccaccgcacccggcctgactcttactgtttcttaaacaaaacgtgccattttgttatgtcctattttatatggtttgctaattgtggaatattatcctccacggggttaccatggtgcctccaagcccacagcctcttccagataagactgtcccatgaagatgcagcccgaaaagccaggtggcttttcccacacctagtaataggaccccatttgtaagctggccagcaacctgagatgtggactggcacaaaaccataaatggaccagttcctatgcagcaagaaacacacagttagcagtgagagctgaactgaggtacagctgtagccattagctgaatttagtgaagaaaagctatgagatagagaaaggatatgaagaattaaggtaaagaataaaccatttagtagtgagacaggaagaagcagacaggagaagatcagcttaatcatgatgaatggtggaacccagagcaaagattcaccagctccagctgtggaagtccactgagccatcttggattcatcccactgacatggtttggatctccgtccccgcccaaccaaatctcatgtggaattgtaatccccaatgttggaggtggggcctggtgggaggtgattggatcgtggaggtggcttctcatcaatggtttagtaccatcccccttgacgccattctcatgattagtgagtgagttctcatgagatttgtaatcccagtattttgggaggccaaggcgggcagatcacctgaggtcaggagtttgagaccagcctggctaacgtggtgaaacgccgtttctactacaaatacaaaaaattagctgggcgtggtggcaggtgcctgtaatcccagctactcaggaggctgaggcaggagaatcactttaatacagaaggcggagattgcagtgagccgagatcgtgccattgcactccagcttgggcaacaagagcaaaactctgtctgaaaaacaaacaaacaaacaaaatttgtgtggcacctcccccgagtcttcctcctgctcctacctatgtgagatgcctggcttcccctttgattggaagcttcctgaggcctccccagaagcagaagctgctatgctttctgtacagcctgcagaactgtgagccaattaagcttgtttcctttataaattacccagtgtcagttatttcttaatagcagtgcaagaacggatgaagacacccatctgcagcttcctactcttcttgaggcctccgtgtctggcttttcctgggttctatgctagtgtacattttcaataagcccccattacttgaggtaactgaagttctcataaaacaaacacatgcccaaccattcctttgcatggttcttgttcctagaatggaagcatggttgaaaagggctggctttaggccaggcatggtagcttacgcctgtaatctcagcactttgggaggctgaggtgggcagatcacctgaagtcaggagttcaagaccagcctggccaacatggtgaaaccccatctctactaaaaatacaaaaattagtcaggcatggcggtatgcacctgtaatcacagctacctgggaggctgaagcaggagaatcacttgaacctgggaggcagaggctgcagtgagccaagatcgccccactgcactccagtctgggcaacagaacaagactctatcaaaacaaaacaaaacaaaaaaagctgatttggataagaaagcatctcgacacctgtccttgcgcctctcctaggctccattggtagaggtcccccaaaggatcaaccaacccactaacacttccaaactccttgattcttcatggaaaaccccgacaattctcagatacgagaaaacagggcggcaatttaacatgacagaaacgtggtagatctttgggacatggttttaagccaatgttagaataaaatatggaagtgatttaattaaaataacaacaaaacatctcaatacttatttttcaaatgaccaggcagtaattgtaactttcttggtatatgtacacttctatgagtttcagcatgtgtaaagatttgtgtgaataatgctataataggaataaagaataattaaatcaccttaaaaactgcctcctgccatccatctatagtcaggtatcccgtcacgtcacgttggccaccactgatccatttattgtcccaaaagttgtgtcttttttttaatgtcatataaatgcaattctgtaatatgttacttttgagtctggcttcttgtactcggtgtaaggccttttaaacctatccatgttgttttgtgtgtcaacaatttgttccttttttttttttttttttttttttgagatggagtctcgttctgtcacccaggctggagtgtagtggcgtgatctcggctcactgagacctccgcctcctgggttcaagcaattctcttgcctcagcctcccaactagctgagactacaggttcccgccaccacgcccggctaatttttgtatttttagtacagatgcggtttcaccatgttggccaggctggtcttgaactcctgacctcaggtgatctgccctcctcagcctcccaaagtgctgggattacaagcgtgagccaccattcctggccaatttattcctttctattggtgagtagtattctgttatatggacacaccatactttgttaatctactcacttcacaagaacatctctccaggttaccgtggctgcctgggtgataatgttttctgccatctcccctccctcatcagctcaaggaaggggagaactaaagcaagaaacctaatggtgtccgattctcagggccaagctccctctaaccctagagtgtgcatctcattgaaggcatcactgtttccacagtgagagataatattctgtatatgcaatagcaatttatccttttttcttctggattttatttttcttcctgggtatgtaaatcccataatgcttcccctattactaaattactctgcaccttttggatcacataaagatctaaaaaaggacaatattgatccgaatagtagcagcatatgacagcttatccacagtcacagtaatatgaactgactttttggggtaccattttcattttcctcctttccaagcttctgtcctatgttcagcatcatacatgacaaaccacatcagcacggtggaatccaaaccacacaccacaccagggcaaattaataacagcctaaagtaaaataatagcagcgttgagcaaatagttaagtttaaaataaatttcggtcattccaattgagagagtcagtaaaccatcatgtgaaatcaaacccaggagtccatgaggaatcagagcaaacgattttgagatcattttctcagaaacgcagacaagccttccaggtcaatcatcatccatctcagtctataatgcaggtagcatctgttgaatatgaaatttccttccagtcaccaaagagcacagttaacctttcacggctgatgccaacaacatcttgcactattttgtaacaacctctgtttgagatttccattattttccagacggcccaacccttattagacgagccatattcaagggctgcagcaagctcttatctcatcatgaccaaagctgtgaatttctctgtgcaggatatttactcttccaaatgagttgttagaaggcttgactgataggggaaccaaatcaacctttaatgaactgctatgtaattacaaaacaaaacaaaaacagttataaacatcaaacacacccatctattgacgaggagtgagcaaaattactcttccagacccaggccagctcctcggcatttttttattaggatgaaacattctggaacaccagaaaatcagtgtttggattgcaagagattctgctactggaggtgtgagtctgcattttacgtctcctttccccaggaataatcttatttgttcttattactgttacgacttggcagcatagtatagcaatattccatgcaaaagcaattattgaggagcagtggttaagaattagcttctggagccaaactacctccgtttaaattttggctctaccactgaccatgtaaactcggatgaattatttcatctctctgggcctcggtttcctcagctctaaaacaggaataatactatgtgcctcatagaattgttgtgagggtcggccaggtgcagtggctcacacctgtaatcccagcagtttgggaggccgaggtgggcagatcacgaggtcaggagatcaagaccatcctggccaacacagtgaaacaccatctctactaaaaacacaaaaattatttgggcatcacggcacatgcctgtagtcccagctactcaagaggctgaggcaggagaatcgcttgaacccgggaggcagaggttgcagtgagccaagatcacgccactgcactcaagcctggcgacagagctaggtgccgtcaaaaaaaaaaaataataagaattgttgtgaggattaagtgagttatgacatatgaatcacttagctcagtactaggcacatcaaaagcattgagtaaatgttagcagcttcccacccagcacattcgttcctggttttattaccttgcgctcagggacatccagatctcaagggatgaaaaagaaccatcttccacttaaagaaagtgtttcaggccaggcgcagtggctcatgcttgtaatcccagtactttgggaggccaagacgggggtgggcagatcatctgaggtcaggagtttgaggccagcctggccaacatggtgaaaccccatctctactaaaaatacaaaaattagctgggcatggtggcacgtgcctgtaatcccagctactggggaggctgaggcaggagaatcgcttgaccccgagaggtggaggttgtagtgagccaagatggcgccactgcactccagcctgggtgacagagcaaaactcaatctcaaaagaataaaaaaaaaaaagaaagaaagaaagaaaaagaaattgttccatcgatttttccctctattctgtggacagggtgaccccctacccaagagtccagaacaataaccactgatgtagagagagaatatcacaagtgggctgcagactcctggatctggtgatggtgattccatctctttcaggtgtggacactcaaggatggcttcaaaaccccactctgtctggtttctggtcccagcccacttgcattttacattcttcatcacgctggccagatatcagggtgccaccaactccatttaacctgaccttttgcacactctattttttaattaaccttggatcagcaaagcaatatctgttctccaaatacagtcatattttattcaagcagtgacaagctaattaagttaattattataacacctatccatataatgaaactaaggttggatgattccagcgcttctccttaaagtgcatcccagtgatgattaaaaaataattaatatttcaccaaagacaggaacaagaagttaattaaaagaggaaagtgcagtcttaatgaaacatatcccattgtgttcaccacaatgcactacagccaaatcccttctcagaatatagatgaacaccaatgaacatcgggtctttcttgagagcatttagaaaacattaacatctcccatttgccacacaccgcaaacattctagaaatctctttttgcttttaaatgagagaaagaaaatttatttatttgtgcaacgtcagttggctgaagtaaattccaaagttggacccgcaattttacttttttgggaggactacacgattaaaactatcatttctctgacaggaacgcagacactcaaacaggtcccaaccacaatggaaggctccaactattccctgttttatcaagctaattgtcctgttttgccttagtctgtttgggctgctgtaacaaaaataccatacactgggtaacttataaatgataaacatttatttctcacagtgctggaggctgggaagtccaagatcaagacatggacagatctggtggttggggactgcccacttcttatagatggccatcttcttgcttgtcttcacatggtggaagggaagagtgagctccttcaatcctcttctacaaggacattaatttttttcatgaggggctccatcctcatgacctaatttactcctaaaagtcccacctccaaacaccatcatcttgggcattaaggtttaacatgtgaatttcaggaggacatatacattcactctacagcatgtcttcataaaagaaaaagtaagtaagatgtcatagctaagaaaatgtagaattttatttggattcagcctatttaaattacatctattgaattccaagcactggtttcctcatcaagagagacggaatggtttttctggctggctaggattcccgaggccatgtctgcagtcaacaagatggtttgtttgcttggcacgtaggatgagaacagaagtgggataaatttctcattccgtggagaatgccagggccacagccacactttgtgccagccaaatggctctgctgcttaggaaaatgagactgaagtcatttgcagaggagagattaggaattagcaaggctctgttttagccaaaattctaactaaccaccatccttctcaaagctggaaaatctgggttcttcttcctcctactactcagcaattctgtgtcctcaggcaggatgctctggttttttttgcgattctgtcttctggttcagaaaatgaggtggttggacctaaactctaactatggtttctttcaatgctatcattctatggatatatcacctcaaagagttttcttcttttattttcttttgggttactttccctttttgtttgtttgtttgtttttgtttttgtttttttgagacagggtctggctctgtcacccaggctggagtgcagtggtaccatcacagctcactgcagcctcaacctcctgggctctagtgatcctctcactttagcctcctgagtagttgggactagaggtgtgcaccccatgcctgaaaaacattttaattttgtgtagagacagagtattactatattgcccaggctggtcttgaactcctggactcaagcaatcctctcacctcagcctccccaagtgctgagattacagatatgagccaccatgcccagcatttttggaaggataaaatgagattggacaggtattatgaagcctattttacagatggaaaagctactactcataaatcttcctgaaatttgttcaagttagtcttttccaaacctcacatttctgactaaatgctagatattccgattcctcattaactgctcaatagttgatatttaagggccgggcttggtggctcaggcctataatcccagcactttgggaggctgaggcgggcggatcatgagctcagcagatcgagaccatcctggctaacatggtgaaaccccgtctctactaaaactacaaaaaattagctgggtgtggtggtgggcgcctgtagtcccagctactcaggaggctgaggcaggagattggcgtgaacctgggaggcagagcttgcagtgagcggagatcgtgccacagcctgggcgacagagcaagactccatctcaaaaaaaaaaaaaaaaaataattgatgcttaaaacaatgcatccagaaacacagtttcaagttcctttcctctaaggaagcctatccctagatgtggtcacaggtctgaaagaagctgacaggtgggtaaactagcatgattgtagtgtttcagctgagcaaaaggggtggttcttgttctcgtttatggttttgttcttgcttttttttctatcgtgggatgctccctaactaacaagcactggagggactctatgaagggccacatcaaagggccacattaaaaagcaacttaatgtagtccatccagatggggcttcactacagtaacaaatcttgtggtgcttatcattaacaccccatttcgagcaggctctcctggtcttcctctcaggtagcaattacacacacatgtgccctgccatgaaactgtatcctagctttgggttgccggggcacaagcaaaacctggcggaaaggggtttctttctcatttatttggaatggtggatttgagtgctggtgtcatgtgaaaggtgaagacattttggaaggggctttggtgcctgaagagggatgggtgagaaggagggggaaggagtctgttccatgggggaaacccagaatccaggcatccaaattggattctacaaatccaggcagagaaacgcccttatcttgagggttgggatgagaaacagcatcgtgtccttataaggggttctcggctcctggtctccgagggtctcagggcgcttttctgtagataattactgtttgaaaagtaccgtgaagtcatttccagcctcagaggaacaggtctgcatctctggcaagcactgagaaatcacatgtttgtgttctaaggaaggaagtctggcagaaaagaatctcaggttgggccaggcatggtggctcacgcctgtaatcccagcactttgggaggctgaggtgggtggatcccctgaggtcaggagtttgagaccagcctgaccaacatggtgaaaccccgtctctactaaaagtacaaaaattagctgggtgtggtggggggtgcctgtaatcccagctactcgggaggccgaagcaagagaatccttgaacccgggagattgcagtgagctgagaccgtgtcactgtactccattgtggacaacaagagtgaaactccagctcaaaacaaaaaaagaatctcaggttagaaatcaagactggtgggcacctcctcaatacctccctacgctgcaactcccaatggtccaggaaagaacactgaactttccagacatcccttttgatttataaagcattctcccagccacagtctcattcctgctcagcacaaataaaacagctattatcattatttccattttacagttgaagaaaccgagttccagaaagtgtaagcagcttatatctaaaatgacattgatttcaagcagcacaatcatgattcaaattcaagcatcactgctggagtcctaacctgtagaccctcctctcccctgtgccccctcaccccctactgtgactccccagaagactgtaccttctggtgcaggaattcaagacatttaagtaccctggatacaacaggactgagtagatttggccctatcctgaacaggaggtcaagataactcatctatcagaagtgaaattaagggagcttgagaatgcttttagtttctctaaaaaaaggataccttctggccagtctcaatggctcatgcctataatcccagcactttgggaagccaaggcagaaggattgcttgaggccaggagttcgaggtcagtctaggcaacacagcaagaccccaccacaaaaacaacaaaaaaaaattagctgggcatggtggcatacacctgcagtcccagctacttgggaggctgaggcaggaggattgcttgagcccaggagttcaaggctgcagtgagccatgattgcaccactgcactccagcctgggtgatgaaacgagaccctgtctctagagaaaagaaagaaaatgatggcttcctttcagaaagacatccaagccctctctatcctcgcaagctgctctgtgtacatttctccccttatttacagttgagactttttcttcacgtgatgcatggaagaggtcagatggttatagtcaattcgggaagcatgcactgaacagggcagcctgctgggtaagagcacgggctctggagtcagaacctctgggttcacatcccagcttcctcatgcatggcattggattttaagcaagctgcttcacccacttgagtttcagtgtcctgatctgtaaacggcagataataatagtgctgacctcaaggggttattctgagaattcaataatataaaccacatgaaggtttagcatgccatgtggcgtgaagagctcaataaatgtccgctgttactcttgttacatttccacagcagcacctagtatagtgtcttgctcccaagtgaataaggcagaagtcctgccctcaggtagcttacagtctagtgaccaagataacacatatcacagaaccatacatcagaagcaagctgggtatggaagagtggttctcaaacttaagcatgcaccagaatccccaaggggcctgttaaaatacagatttctgggcctcaaccacgaagtttttgtttccatacgtctggagtagggcctgataacttatatttttaacaagttcccaggtgataccgctggtccaaggaccacactttgagaaccattaatacagagacaagaacaggcttcggagcacatagtcctgagttcaaatactgctcctgccccgtcatagctgcctgacctccagcaggctgatggagctgagctcccatttcttcttgtgcaggtgtggtgggaagatgaacgaagagaatgtgtctaagccagcagtcagcatatgagaaagcagaacctcacataatataactgcagaagttgtaccaggagctagaaggagacattgatccccgctgggcagacggcttcagggaggaagttggatttgagtagagttttaagcagctgagaatcacaaagatagtaacataaataccttgcagtctttcagtaacaaacccgggagtattgaataagaagatgattagaagcatatttaactgaattttgattgactttggcccttctggacctcgaaatatgagtgatggcaaatagccaaaatgcaccccattctttccacccattatccacataaaagacttccacatactgtggcttcacatgacatcaggatgggttttaaattccatgcagcaaagcaccaggagcagttgtgctacaccaatgcttttctttgcttttttcgtaattaaaaagtgagttacttctattacccaagctggtttaccactggagctgcgatccattcatttcactcactcattgttacaattcaacacttcactcacttaccgtttgaaaatgttgatgtaaaatgtggcagacatttcctgaacacaccaaaaatttgacaaccagctcccgggagagtcatttcaaatcgctcaacgtatttgcccacaacagagtccagggccctgcattcatcccgcgtcccagtggttacaagtttctccttcatggacgtttgcctgggtcccgaagccacagaatgtggggcaatttgacgtctggcacctcctgcaaagcgaagatgcaggccaggaagagcagagcaggagaggagggggttggtttcagacccaccagtgaaggaatctgggctttggttgcataaattctgagcttcaagagggagccaagttagtacaactagaggggaggtcctgatgctggatcgagggagccgtaagtctcatgcccagagctgggactgcagaagccgagaaaggaggatgacaggagaggagcccggggataaatggaagcaataagcaatctgcatttcttccagcccaacagcccatttggcaggtcactgcatctagagatggttagcctgactctgtcctccttcaggagccctgcagtgtttctcaaagtgctcccgaataacaggcacttggagcccctcttgtttcaaaaatcaatattgtctctgtttccttgagaccacaaaccagatgtccacagacagctatttgcaacctcctctgaggttcccaactcttctccaggttctgtcttccacggtttttccctgtctccaaactgtcttctcctccagtccctactgaaagtgagcacgcaggtatgtcccgcctgtgcgcttctcctcccctcttcttagatttaaaccacaaactcactacctacaacaggcagggctgagcgaaagcatgagttgtagacgcggcggctctcaactcactacatgcgtatgaatcatgcggggctgtcgtgaaaacacaggctctgtattcagtgggtctgggctggagcctgagcttctgcattcagacacagtcccaggtgacgctgctgctgctgatctgtggaccacactttgaatagcacagttgtagctcataagaaattcatagaaaccagatcagaagtgccctgttattctgagatatccactgggacatgaagaaaaaaaaatcaaatgtgtggatttcatgttagtgctggtttaatgcaaatggattttagcagtagctgtcgttttcatgttgcttgggggttatggatgttactttgtggcatttctggattatgctgataacagaggggaattatgtgaaaggacacccagtgtggcgtggaaacttccacggaggtgtgaatatgcagctgttcccattactatctgtgtgcactacacatgccactgaaccatttgaaaaatagaaatcataactgccctgcttaacctgacatggctgctttgaaggctgaaccagacaatatatgagaaatttcaacacgctttcatatgataaagtattgataacttctcattgggctcagtggagtgcagtattagcaaatatgggatgcaaaatcatcttcttatagagaaagaactgcaaacattttcactggtcacatatagcactgctttgtcccacattgcattttaatatactatcccattttattttccttctggtcttagagccgaaagaacaagtccttgcatcataataacagcctccatgtaaaatataaagtcatcaaagatcccggctcattttttttttttcctgagatggagtctcactctgtcgcccaggctggagtgcagtggtgtgatctcggcttgctgcaatctccaactcccgagtacaagcgattctcctgcctcaggctgccaagtagctgggattacaggcgtccaccaccatgcccagctaatttttgtatttttagttgagacggggtttcaccatcttggccaggctggtcttgaactcctgacctcatgatccatccatcttggcctcccaaagtgctgggattacaggcatgagccactgtgcccagcggctcattttattaatatggaaacaatgagatttatataaatctgcttattcgagcttggccatctttccagctgaaacatctccagacactggcccttctggaaaaaaaaaaaaaagattcactttagcctcatgtgaattcttttccatgagagcccttaaggaaataaccacccaaagtgtcccagcccacacatccaagtgttcctctttgtttgggggtggatggtacactcttgaaaacttccaggagaactacaaaggagaacatgaaggggttaatgtttagaatggaccatctgaaaaggaagtccgccttaataagactgaagtccagtccgaaattatgtctctatgaatgtaataatctctggataagcgtttgccaaagggaccaagcttctgtgtccaatttgtatcacatttagacaagtgatgttaaaatcctgggcctgtatattatacaattacagaaatgtgattttcattatgctgttacagcgctagttgttattacgcaggccatacttgcagcagatgtttctcccagcagcacggttgctgccgctgcctccttcagtggccaaaatgtcatcctctcttctccttttttctcagtgccacatttgtcctgctcacatagagttgtatcagggctaacaggaagtgctcctcagcctcctggattgtttttgattgggtttgacttttgggagaaactgaactcctgcaaagcgcagcctggaaacagaattctccctccctgttgtcattaacccttttctcggcaggcagcaattcacataaatgcaaaccagatgggtcagtcagagagcctttgcaagaggaaagtacatttttatatgctccacatggaaaatgaataggaggtgtgtttcatgcattcgtcttctgttctgggaaatctgcattgatcgttatgtgatagtggaattggctggaggttcgtacctggtgggggaagaggccttcacccatcttggataaagctgacccaatggatgatcctaacagcctttggaaccaagatgttgcaggtcagaccaggtcggccacaaatcaaaactgtgttcgatgatatcagtctaatcactcagcaactattttttgtgtgtgtattcagtgcagaagggtcaacaggcttcagagaaggttcagcgccagaatttcagaacaaggtcagaaaatattaccttctcagactgaagctaataagaaggaacatgaaattggagcaattagccatctgtagaggaaaactgcctcttggcaatgtgttacagatgagattgtgatgttccctcagtctccacccagaagccacgttgtctccataaccattcaagaagagtgaaattggccgggcacggtggctcacgccagtaatcccaacactttgggaggtcaagccgggtggatcacctgaggtcaggagttcgagaccagcctgaacatggcaaaatcctgtctctactaaaaatacaaaaaattagccaggcgtggtggcgggcacctgtaatcccagcaacttaggaggccgaagcaggagaatcacttgaacccgggaggcagaggttgcggtgagctgagatcgccccattgcactccagcctgggcaacaagaacaaaactccatctcaaaaaaaaagaaaaaagaaaaaagaaaaagaagaagaagaatagtgaaatgtaagaaatataaggcatctattattatgaagttctcagaaacgaggggtggagctgcccctggcagacatgtcctgagagaaacatctagaaagggtaattctagtgaccccaccttgaaggaaataattcctagagcaaccgatgccctttgataaattctgtacttgtaagcaaacttcccctgctgaccaataccagttaccccacccaaaatggttctcatggtgaactaacacattaacttcccagtaggtgaggcttgccagaatttgaggaacaaattcacactaattaagtatgaatgtccccgggtgatagggttgggaagtttgtctcctccaaatctcatgttgaaatatgactgtcaatgacggaggtggagcctggtgggaggtgattgggtcatggggatagatacctcatgaatggcttggcaccatccctttggtgataagtgagttctcactcagttagttcacacaagatctggttatttaaaagtgtgtggtgcctcccctccttctctctcttttttttccccttttctccctctccctcctctttctcttgctccatctctcaccatgtgacatgttggctcccttttgccttccatcatgatgggaagcttcctgagacctcactggaagcagatactagcaccatgctttgtgtacagcctgcagaaccatgagccaattaaacctcttttctttataaactacgcagtctcaggtgtttctttatagcagtgtgagaatgcactaatacaccggataaattcataaaagtgaatcctgaaccagtatgaattgcactaatacactgggtaaattcataaaagtgaatcccgaaccagtatgaatcataccaaaagtcagacaacttcattcattcattcacacatgtatttgatgaaattgtaatacctgacatctctgtcttggatgttgtgttaggcgcggagatgctaaggcaaattgcaatgttcctgtgcttaagaagcttccagtatgttacagagcgttttttatagtgtggccaatagagagttataaaattagtcacaaatagcgttgtaaaaaatgcaaatataatagaacaaaaaaatagaataggatagaaactattagtgttttctcacttttacatcaccaacaacaactaattcttaaattctccaacccaacttgatgtccaaccattcaatttgattccgacactaactacctggagtcagcactgaccccacagtttaaaggctcagccccacaagactaccccctacttcagatgccaacaacaaatggggtctccaggctacttgcactgataagaccctgaaaaacaggatgtggaccaagcaggctggacctaacatggcactgactttgacctaggtttctcctaggacctcattatatgttcattaacatactcaacacacatccactagcatcatgactgttcctagaacacccatatttggtgtaaaactgggtggcaccacggttccaagaaatctttttccaggaactttcatgaatattccagctcgtgttaaagaaatccataaaggtaacaacgccaaagtcccttccatgtgacttttttgggtatgcccataagctcatttcttgagtgtgtcctttttgctttgcaataaatctccatactttcactattttccaactcatccttgaattccttctcataatagtgtcaagaatctagacagcggctggagttgaggtcccactggcatttggtgacctccctcagcccaccaggatcatgattatttgctagaatgagtcacagaactcaggaaaatgctacacttactattccagtttattatcagggagaccaatgaagagccagatgaaggatagaaggtcaggtcaggaaggacccagggctcagaagcctctgtccctgtagagctggggtacatcaccctcccagtacatagatgggttcaccaaccagagaactcccctaaaccttgtagttctgtgtttcatagagcggtttcattatgtgggcataactgattaaatcactggtcattagtgattgatctcaatctctagcccttctctgctctcttggaggttggggattgcagctgaaaagtccaactctttaattgtacaactagcccctattctaaagctatcttatacttcaccctacgagtcatcttgttagcatacaaaagacactcctatagctcaggaaattccaagggttttaggagttctgtgtcaagaatcagtaacaaagagaaaacatattttatgataatacctcagttggacaaggtaggaattagtgttattttgtggaagttttgttctcaactgttcatatatgtgtttgtgtgtcttccttccggatcttgatataaaagatgtttcttactgtggactgtggtaaaaacatttaaaaatctggcagctagacatgcctgcctccaagactgccctgtaaagtctgacatgttcactgtttaaaatttaaaaaaaaaaaaactttagacaaattaaattgacagagtttaattgagcaaagcatgattcgcaaattgggcagccctttcctcccccaaccagaataggttcacagagactcagcgctgctgtgtgatcggagaggatttatggacagaaaaaggaaagcgatgtacagaaaatggaaatgaggtacagaagcagctaaattagttacagcttagcctctgccttgtttgaacagggtttgaacagttggctgcctgtgattggccaaaattcggtgattggtacaagaataggagacaacctgtttacacatctgcttaggttccagttcactatgtagggagcaacttggagactgaatgtaaaatatatgcaaggagacagctttagggtaagcttaatttaacgtcactatgctggtgcttcaggagggctggtggatgacatttctccgatccttcaactcctctttctggatcttcattccccaactcctcctacgatgtataggatctaattcctataataaatcttatgttccatgtgttttcttaaaagaagtttgtaaaacacctttctggaggagacattatacagtatttgtaatgatttgtgtctgtgtgcaaagacttgacaaaaacatgtaaaacataaaaagaaaggccagacaacaagtgcctttaacgagcaggaaaagcttcttataagaggtaacattgaactgagccttgagtgatgagcagagacacccatgagacaacagctctcagaacaacaaatctgcttttctctctcccactaagcgtgatcacttcacttccatccaagtctattctgcatttatcacttgaaaattcagcaaaatattcatccaactaataagaaatcagccaattcagttgcatgcttgcatctgtgtgttgtttccggtgaaattgtcccaagaagatgccccaaaccccaggcacccagagcctacctaagacagaggttagaccaggacaacagaaaacctattccccaaattagagactttaaaaggtgaagtttacttatttcttgtagggcaataagtggactgaccataaagagaggagtccagatgtcttattgggttccctggaaacagattctggaatgagttgcatatagaaagttcactgtggaaaagacagcagtaaggaaagaggaaaggcaagaataggcagaggggaaaattgacccacaatgtagctgcagctgacgcctcagccagtacaacagggagctctgcagttggagtaactcttcagagatgcccgcagttgaggtaagagggctgagcttttgtaatctcagggtaaagcagttccctgtagccatggacaattctcaacgatgaccatgactgtgagccctcacagctatgaacgatattcctaggagctaggaaacgggtgtgtgggccttgaaaagggcatctggtacagcccaccatgatctaacacaatcctatattctggttaactggctttccagttactggcctggaatgagtatgagctataaagacaaattttgtcaaggtttgattaagcctgtgtgactgcgtgactcctttgttgtaagtacagaatttaaaacagcattaagaggagaaacagtctgataggcaggggtagacccagtcctttgacaagagatatttccaaggccaatacagaaagaggacagcagacttctaaaattatcagattcaaaagagtgtatgaagaaccatctgtcatttttggatggccagagatgattttttctggtgataatatcatccctattttgctttaggaggccatttctttctcgccatcagtctataaggttaggatgggctggccctttcccttcattctataggtgggcaaggaaaccatcttggcaaataagaagtccccctacttctgggattgttcagagttgggcatacaatccaaactagccaatgaaagttaatgaacctcatccccaagactttcattggaacatttgtgaacaagaccttccctttctgccagggatactaagataatggaccatctgcctggagcttccaatatccatctgcttcctcctgggtagagcccatctgagaattagaccgacaaagaggagcgtgggactcagaggtagagtgggacaaattcctggtgatatcttttgaacattggtgttgctataaaggaatatctgaggctgagtaattttaaaataaagaggtttatttggctcatggttctgcagactgtataagaagaatgtttccagtatctgcttctggtgagggcctcagactgcttccatttatgctgaaaggtgaaagggatccagtgtgtgcagaaatcacatggtgagagaggaaccaagagaagggtgaggtgccagtctcttgttatcaaccagctcttgaaagaaccagttgagcaagaactcactcactaccaccaggatggcaccaagccattcatgagggacatgcccccatgacccaaacacctcttaccaggccccatctccaacactggagatcaaatttcaatatgaggttaggagggtcaacttccaaactatagcaagtgcctagatatagtcatcactgaagattccctaccatgtctgcctctggcctttacacttcattgagctagtaactgttcttttttgctgaagcccgtaagttgttcttttcattctgaaaagagttcaaaccaatgccacatgacacctgaaagggagcagatggtcttacgagctcctctcccaacctctccagtctaatccatccaagcttttcacccttcatatgcacaatcgtcctactcctcagggtgaactgggggtgagggaagagtctgcagtttcatcaacaagccaatagtgacctgggaagcatttatggaaaagtgaagatttgaatgtggattttaaaaacagtcagagtaggctaggcacagtggctcacgcttataatcctagtactttgggaggccaaggcgggtggatcacctgaggtcaggagttcgagatcagcctgaccaacatggtgaaaccctgtttctactaaaaatacaaaaattagtttggtgtggtggcacacgcctgtaatcccagctactcgggaggctgaagcaggagtatcgcttgaacttgggaggcagaggtcgcagtgagccgagatcatgccactgcactccagcctgggcaacagagcaaaactccatctcaaaccaaaccaaacgaaacaaaaataataaaaatagtcaaggtagagacaaagaggaaattgaggggaaatacaatgcgtgagaactctagggaaggaaaaacttttcttctaccctcttaggttctgtggttgggcctgagaattcagttgataaaacacagactatcaggaggaaagcatacacattttatttgatattaatattttgtgttgtttgtttgttgttttctgagacagactcttgccctgttgctcaggctggagtgcagtggagtgatcttggctcactgcaacttccacctcctgggttcaagcgattcttctccctcaacctctcaagtagctggaactacagatatgcaccaccacgcctggctaatttttttttttttttgtatttttagtagagataggttttgccatgttggccaggctggtcttaaaatcctgacctcaggtgatctgcccaccttggccttccaaagtgctggaattacaggtgtgagtcactacacctagcctgatattaatatttttgtgtgtacatggagaccttcatatacaaaaaaaatgagtatccaaagaaattgttaggcatgaaagcttatataccattttaacaataaattgtggagaacagtcaagacaaaggaaaaagggtttgggctaggggcagtaaactggaaaagtgactaggaaatatctgggggcaacgaatagaaagcaaggtttattttagtatatttctttgtacagattcatcttgccatctgctcttcatctccagtgatgagaatgttctcctcttcttagtacattaagggcattcctcatgggaaatttatgccctgtttttaggtaagaaggtcagcacctgctgtttctcaactgcctttgactcaggatgatcaataggcctaagtggcacatttgggtctgttctgattttttcacaagcaatgaggaaactgtctggtcccaagtgtatggctaaggaaacatggagagaggcagtctgatatgtgcagtgactcacaggaaggaggccagtattagcctccttcagctgaatccctgctccaacatatttgctacatgacctgggaaatttccttaggcttctggtgtttcagttttctcagtgataaaacaggaataaaaatggcatttacttaatataattgctgtgaggattaagtgagttaagggtatataaagtgcttagaaaagtgtctagcacatatgagatgaagaattaatattaggtagtcctatttttatttgaacggggagaaaacctccttgtattgtgaagttgaagcagagaagcagatgtggctgagaagataaacatgaccccctgatggggaatctgatctggaaaagttggctgtcatcttggatgtttttcctgggctgtgtaattgtggtgggttcaacaatcccttcccttccttccacaggtatccacatcctaatccccagaacctacgagtacagggcaaaaggaattccacagatgtggttgagttaagggtcttgctatgaggagataatcctggattatccaagtgggcccactctaatcataggagtccttagaagagggaggcaggagaattcagagtcagggagggaaaggtgattgaagcaaattgaagggatgcagggccatgagccagggaatgctggcagcatctacaaggtggaaaagtcaaggaaacagattctctcttaaagtttttggaaggaaggcagccctgccaacccactttagtcttttgacatccagaactgtaagtgaatacatttgtgttgagctactaactgtgtggcacttttccccagcagcaatggggcactaatacagtgagcacagagaaaagttaggtttaagtcagaagtggcagaggtcacctgggaccaggaggggatgagaggggactgcctgggaagggacacagagaaccatcccaagaggaggaaaccttctatctcctgactgtggtagtgcttactcaggcatatgcctctgatggaactcatccactgcacttaaagtggatgcattcatatacgggaatgatacctcaataaacttgaaagcaagggttttaaaaaaaagctattttcaacttctaaattctctaatcctccctattaaagagaaaggcaagaatgctagatttccatttttattaaggaatcagatccaatgccctcattttatggatctgcaaatgttaccagaatgccagggtttctgtctaggtcccattgctcactgcacaaaaaaccaattactgagacaacaagtattgccagctggagaagactttaatcgcaagcagcaggcaaggagaatgggagatcagcctcaaatctgtctctccaacaaactaaaattggagggaaactaaaatggcagggaagatgggaaaacaggaactagggaggaataaggaagcaatcagaatggataagtggcctggcatctcattatctggatgcagtaatctgatgagttttagtcccttgcttgatggttggtttcttgaggaaggaactaaaatgagacaaagggaaatttcatatttcaacaacaggagggtcaatttctctgtttatttaaaaaaaaacccataaatattagttgtatgaggaaattgggccagtttccaaaacacagtctcagatagatgaagagacttgtcccaaatcatacctaggttctgccctaacagagacaagagctaaaggatttgactcccatccagggctctttccccacatgactctgcctctctctttcatctaatgctgggactcccagaaaagtacagggaggtgaacctgtaatgtcctgcagtggcatcctccccgctattctgtgaaaccagaatcttcctggtccacatgttctctcccaaagtggtgagacaacccccgttctatttccaaaaagaacagggatcaaaacagcccttccctgtctccctgatgtgattgggctgtgtgcccgcccaaatctcatcctgaattgtacttccaaaattcccaagtgttgtggaagcaacccagtgggagatagtttgaagcatggggacggattcccccatgctgttattgtggtagtgaataagtctcacaagatctgatgattttatcaggggtttctgcctttgcatctcctcattttctcttgccaccaccatgtaagatgtgccttttgcctcccgccatgattctgaggcctccccagccatgtggaactgtaattccaattaaacttctttttctttccagtctcaggtatgtctttatcagcgcatgaaaacggactaatacactccctactgccaagcactctcaacatacagcacccagcggagggcagaacagttacaaagatcaaagagatttcccctcgtaaaattccatttttcccaagttagggaggcgccttgcttatcccacccctgagtactttaccctttacccactgactcagctcctggctgcaaagggatcccaccagccacattactaggtacatctggccaccaccaaagtcctggaaagtcctaacctctgggaggactattatttctgccatctggaaaattccacccaccctctcctactttgcagagcccacttcacaggaacccaaagccctttcctgtgtgctattccacttcctcaaacaacaatctcaagaggcaaacatccaccttttaattttgcagacagacagggaaagctcgaaacagagaagatggagatgggaagtcaggtgatggaggacttccacaggcccagactctgcaggccaaataccctactcaggttcccacaaagctctggccaccccgagtgctgtgctagaagcttggaaccttcccagcttccatggagagagggatgggaagcctggatccccattattcttggggcctcacactatgcaaatgagacctcccagagcacactgacatttgttggcacatttagtgcccttggcaaggaaggcatctagcatgcaatgagggctgaattgctcttggatgatgattttctctatgtcaaggtgattttctctatgtcaaggtgattttctcagcagaaggctatgagctttctccaggaaagcagacatggcaggtggacaaagattacctggaaatagaatttaaaggttctgatgtgtctttttaacagatttcagaaattcctagagttggaaggggtcttagtcattccttagacaaacttcaggtgcatcatacaagggtactaaggggacatgggctatgtccctcagaaccaattcacgcaaccaccaccaagatactcctctgagcaaattctaatgcagtgacaccagtgtggagggagacagccattaagcatctctgctacttgcaggctgattccaatcgactgaatgaaatacgattaacaccttgaactttctggagtccagatccaaagaccttgagtgctccttgcaactttaagaatatatgatatattcttaatgtatatatgattatattgcccttagatactgcctatccttgttacggcgccatcacactcctcagcctcccattctccagaagccagctcactgtcttttggcttctaagcagcaaatcattaagtcaaaggtccaaaaggaagagttgttgcccagaatctttaaaatatttttgacaaagcaaaggatgggattaggagttaggcagcatccagaaataaaacacagtgcattttttgtttgtttgtttttgctttgtgcttgaaagcaagattcccaactatgagttccagcatcagggcagaatgcgtgagacctgttctctaagtgctgttactcgccaccaggagtccgcactgtgtggtctaatcacctgggaacttgctagaaaggcaatttgtggggtcccactccactcctactgaatcggaaacgttgggggtgggacccagcaatctgcacttttttttttagatggactctgtcgcccagactggagtgcagtggcatgatctcagctcactgcaacctctgcctcctgggttcaagtgattctcctgtctcagcctcccgagtagctgggattacaggtacccgctaccatgcccagctaatttttgtatttttagtagagacaaagtttcaccatgttggccaggctggtctggaactcctgatgtcatgatccacccaccttgacctcccaaagtgctgggattacaggcatgagccaccgagcccagccacaatctgcattttaacaagcattggggtactcattcagtttgagaaacccatttttcagccttgcctttccccttcctgagttataggccctttgagaatctgactcaggctagcagctctctccaagaaaaatgcacaagcaaacacttttgcacacaatttctagggggctcaaagaccaccatgaattcagcccattcagaaaaaagccctaaggctctggagaccctggctgagaaggcccactctcacgatggaatcatatatccttaatgttgcaaggagcactcagagtctccggatctggactccagacaggtcaagctggtaatcatatttcattcaatcggttggaatcagcctgcaagttcacaccagcaaagcaggtgctcaagcccgtcactgtcatcaccccccacgtcccaaacagccttctcaacatcatccccatccgccccaacttcgatttcactgatttccggaaaagaaaggcgaaaaccgccatcagggtggcaccctaaacgtttcataacaatttttttttttttttttttttttttttttttttggaaatcaaaagccaaatttaagaagggagcaaggaaggaagttggttccggctgctgttacagaaaaacagagtgaaggaacccacatccaccactaggtggcggacatggacgcaaaggcgccattaggccagagatccccaagggcctaaatttgccttcatgcctaagctttttggcccataaagtgttagtaaatattttcaggaaatttcacataaaatctagttctcagcctccattgcaaaacagtcccgagatctgacactgtctgagcctgcgttttacagagccactgttgcctggctcaagacggagcaccaccccctcagatggagcacagagacttagcttgctctgatcctctggatcacccatcttaccttcctggccactgcaggccgtagactttgccactccaatagcccagagccacttaagacatctgcaggtgagggatatgggtggtttctagacaaagattgactcagagcagcaaagtgaaaagcaagagctgcctgcatgtatttttctgctctaacatttcccccttgactcttgactctttgccccttccctccttggttttatggtatgcatccttgtttcatcactcacccccaagcctgggtgaggtacctcttctgcgtgccccacaccacgcgattgcttccctagcatagggcttaccacgtgcccagtttttttactgtctctcccattggtttgtaaattctgtgagggcagaaaccaagatgatcttgtccactattgaaatgtttagcccagtacctggctcttcaacggaattcaataagaaagaaaagaaaaaaggaaaaaagaaaggaaggaggaaggagtggaggggagaagggagggaaggagtggggtaggaacagaaggaaggaaggagggaagggaagggaggaagacattgccaatcgagcatagcattcttgctcttgagcctggaccctgaggccttctcaaaacaatactccaagcagctacctcagtctgagttggcacaggagatgcaaaatactttctgcctgatagcctgggaagaagctgtttgggaagggattccagtaaggaaatgactgccctgcttaaaccttggaccggagtgtgtcaggggagatgggcaaatccgtgttgttctggcaggaaccaaacccaacagaaaagagaaaggaaggagaggcagctattcagcaaacagaacataggctgtcacgaaaagacttggttaacttcaggctataggccacaggggtgcagttgactgagggattttacggatgtatctaagtaacgtatcttagagaagctttctgagaacaaagccccatgctggtaggaacccttcccgctcttgggcatctcaactgcaaaccagatggagaggtggattggggcactcttcacacatcttagcccatggaggaaaaacatgagtgtacactgccccctagtgttcattgttggtaacacgatgaggctcgggaaatcataaaaaccataaatgtctaatgaacagatgcaagagaagataaaaactacattgattttattttagcttttttcagttaactgaaacacacactcacacgcttatgtataaaacattgagaaaaagccatagccaaggaggagagtcaaatctttaaagatcccaaaccagatactgctggccaagaacgaatggatgaattgggaattcaattcaggccccttggataccatccagatgttcaagcagctggtcacaccaagtcccttccagtcaattacttttcttgatgtttctaatcaacagcattatatatgtgatgctataaacttttatatttaatattagctcataactcaggatcccaaaccagatgttttgggtgagaaagaaattgatgacttatcaggagattgaacccaggccactggctgctctccaggcattctaccagctgagctgcaaagcagggtggttgctaccagctccctttagttatgaggagagagagagaggagtgggtagaatatgaacataaagccgtattccagaaaagcttccatgaattctttttctcttataaaacaggagcctgtagcattgtcttgagtcagtaatggtcaggtatattcaaagctttgagctcgtctcccttcctttatgacattatagaggcgcagggaagcagtgacggaagggaaaagaaaagtaaaatacatggccaggaaaaggagatgcgctgacatgatcgattgtcaccaatgaggtggggtaatgtctttaaaaatattaaccaactttttcttccaggaaaagtccccctgtgcccttccctcaccaaagagctaggcccactctctggaggaattaggcagaagagagagctgagaacaaagaagtcttccaggatttggtttcaaaagcctaagcccctggggacatggagaggacaaaagcttcaagctaaggaaggagaagagaaactcctgctcgttatctctcttgaaaaacatttcccaatctgtggagcagggatcggaaagattggtgggtcccagagacatgggccttgtgtccagccaacttcctgagttagaggcctgaggaggtagctgaccccaggcagggaaagctgtgcatggtgtctgccagatggagccagagtaattccaaacaagataaaccatgaaaagcacctagcaggatgcctggcacacagtaagtgctcagtaaattgcagctgttactgcttttatgagggtactcagttttccagtgccttaaaaatcaccaaagccaagttcaccatggcaggcggaggtacgcttcctcagcaacggacagccagcatccaccactcttgttctttccacccctacccctccttccgacatcagacgagaccacttttaactcagtttcttagaagtaactaaggtcaaccaatgtgttatggttcattttgtgtgtcaacttggctagctcatggtagccaggtatttggtcaaacattactctagatgtttctgtgagagatctgttaggtgacattaacatttaaatcagtggactttgggtaaagcagaggactcactgtagtgtggatgggccccatccaatcagctgaaggccttcaagaaaagactgactttcccaaagaaaaaaggaatgctgacggcaggctgtcctcagccttgaatagcaactcttcaccgagtctccagcctgccagcctaccctgcagattttgaacttgtctgtctctacaatcactgtagccaattccttaaaataattattaaaagatttatatctatctggccgggcacagtggctcatgcctgtaatcccagcactttgagaggctgaagcaggtggatcacctgagatcaggagttcaagaccagcctggccaacacggtgaaaccgcatctctactaaaaatacaaaaattagccgggtgtggtggcatgtgtctgtagtcctagctactcaggaggctgaggcaggagaatagccagaacccaggaggcggaggttgcagtgagctgagatcatgccattgcagtgagccgagatcgtgcctttgcactccagcctgggcaacacagcaagactccatctcaaaaactgaataagcagcaaataaataaataaataataaaagatttatatttatctatctatcatctatgtttctaggtatatttatatctatctatcatctatttatctatgtatctatcgtttcatcttcacatcctgtttctgtggataaccctgactaacaacacaaggatgccacaaaaaagtcatagaatccacacaaatatgtctttcctcatgaccctatcactacactgctagactgaaaggtgaatactggatgtctagtggtgaagtattgccaaggtaactatctctctgggacgcaatgtcttcatctagatagctgggaaataagattatatgaagaatggcaaatacatttcatttacctgccatcttcaatccatgagtagtggtttccagaaacaccatgttgatttcttcccccaccgcctatggcaaaaattagaaataaataaatgggctgggtgcagtggatcacatctgtaatcccagcattttgggaggccaaggcaggcagatcacctgaggtcaggaattcaagaccagcctggccaacatggcgaaaccctatctttactaaaactacaaaaattagtcaggcgtggtgggggccgcctgccatcccagctacttgggaggctgaggcaggagaatggctttaacctgggaggtggagggggcagtaagccaagatcacgccactggattccagtctgggcaacagagcaagactccatctcaaaaataaaataaaataagaaaaaataagactgtgttgagaaggatgctgaggtgctgtctgaagtggggatgggtgtggagaagggtgccatgactggtagctgagcatgcagagtgggggtgatttgcccacctgtgtttgtatgaaatctgacttctcagcagcgtttgccagaattttcactctgtttaaatgctttcatttcttcttgttgagactccacgtgctactggttttccaatgactcactggtggctcctccttggcctccttttccaggctccaactcttctgcttaagtttcaatattgggaatgccacagtctccgggctgggcctgggacatgtcttcttcactatatgagatgactctccccaggggatctcagctagtcgcttggctttatacaacatccgaatgtcaatgaaccacaattttatgtccccagtcctaaattctcctagaactccagagtcaggggtggaacagagcacatgctggatctacctacaattggcaatccaaatatgacatgtggaagacagaactcttgctttttacccaaatctgctccccatctgtcttttactatccccacgaaggcaacttcatcaacccgcttggccaggtcaaaaccttggagctctccttgattcctgaatattgtttacccctgactacacccgtcatccgtcagcaggctctgagggttccgtgtaaaaccaggtcctgatctgtccacttctcttcatctctgccattcccacctcagtccaggttacaagcccgcccctacaggcccactgtgcccctgggtcctccccccctcctctccacacagcggcaagagccagcctctgaaaatgaaaacctgatcaattccactgtccactcatataccctctgggggcttcctgttcccttagaatgatatacaaactccttgtcacttcccctattgaagcctagaaagacatataacagtctagaaagacatataacaagtaaatgatgacaatttggtgcgttaactgccagaaaaagaaatgggaaagcattctgaacctggggagactgagagagacagagagggaagggggagagagaagagaagaaaagagagagaaagaggagggggagaaagaaaaatgggagacgagggagcaagggaaagagaaagagggggaaagagagaaaggggccaggcatggtggatcacgcctgtaatcccagcactttgggaggccgaggttggcagaacacttgagccaaggagtttgaaaccagcctggccaacgtggcaaaacctcatctctactaaaaatacaaaaattagctgggcgtggtggtgcaagcctgtagtcccagctaattgggaggctgaggtgggaggatcgcttgaacttgggaggcggaggttgtagtgaatcgagatctcgccactgcactccagcctggacgacagagcgagaccctgtctcgaaagaaagaaagaaagaaagaaagaaagaaagaaagaaagaaagaaagaaagaaagaaagaaagaaagaaagaaagagagagaaagaaagaaagagagaaagagagaaagagagagagagaaagaaagagagagagagagaaaaagaaagaaagagagagagagggagagaaagaaaggaaggaaggggcaaagagaaggagaaaatgggagaaagggatggggagacagaaaaggggagggagagtgaggaagaaaaaaaggagagggagagaaagagaaaggaaaaagaggaagggaggaagagaaagggaaggagagagtgaaaaggaaagagagagggaagagagggagcaagggagggagagagagaaggaaagaaagaacaggaaggagagaaagggaggggaagagagaaaagggaagagagagaagaaagaggaagaatgagggagaaagaagagagggggaggaaggaagggagacagagaaaggagagaggagagagggagggaatgaggttgagggagagagggggctggaaagagagggagaggatgggggaaaggagaaggagggagagatgcctattccttccctctgctacctcctttcatcctcatggcaatcctggagagcaaggtgcagagtggctaagacatttgcccaaggttacctggctactctgggtcaggttcagcaccccaaagtccatgaacccctgactgcaccacaccgtctccacagaagccagccgcaccaccctcacccttctccctggacagctcctgacaccccgggttattactgtctccacacgggacaccttgacacacctaggctcacctcctgggatacctccagggagcacaggatcctgcaccagcattgctcaaatgcaagtaacataaagaacccaattaaatgaaagacacacacgtacacacactcacacacacacacacacatgctcacacacacacagacacatacatacacacacatacacatacaaacatatatacacatgtacacgcaatcacacacatgcacaaccaacacatacacacacacacatacacacacatacacagacacacacacacagacacacacaacacatacagaaacacacaccccacacacatacacacacacagacacgcatatacacacaacacacacacacacacgcacacatacacacataacacatacacacaggcgcgcacacacacgttgaggcccctgagaacgtatctctgagctccagtttgagtgaagaattaaacagtaaactctggtccttttgggatcatctggcaccattagcgccataaccaggaatgcaaatgtggacaccgactcgaggggcattcctagttatttaagggtcctcctcagccctgcagtgattgtgtgcatgattttagaataccttcagtggaaagtgctaaactgaagaattctagaattctcagatccctgagaataaatcaacaaactcgcagggatctgagatccctcctcctggctccgccttccccagggcctgcgcttctgcgccctctagtgaccaagggcgcgcatcgcactcctctaggacctgattctgcgccccctcctctgacccgggagaactggaggcagggctgcaggatgaaaggataaaaggaaacctccaaggcccttcatgttgtgactttcgccgactgccagcctcctcgccgaccctccttcatcctacttcatcctgaatgtatcctacagtaatagcaactgtttgaggcgaaatagtggcttgggaggaacgtgaactcaggaactaagcagctagggtgtgcatgctagttgcattacttaattttgtaatcttctgcaaattaagccctttcagcttcagtttcccatctgtacaatgagaatagtaataggctacacctcacaagagcgctaggaggagcaggtgatctggacacgtgtgtggaaagtgtgcctatgatgaagtgaaccctcagtgaactgctgtgtatcctatcgcttcttggcacactcctacctttcctgtctccatgctgcccgctctggatagaatacccttcctcatcttgccatcctggaaatctctcaattttttcaaaatcctaatcgtgccatatgttctgtgagaagccttctctgacaccattcttttttttttttttttttttttagacggagtctcgctctgtcgctcaggctggagtgcagtggcgtgatcccagctcactgcaacctccacctcccgagttcaagcaattctcctgcctcagcctccccagtagctgggattacaggcacccgccaccacgcctaatttttgaatttttagtagagacggggtttcaccatgttggccaggctggtcaaaactcacttgttgaagccgtaacccccagtacctcaggatgtcactacatttggagatagggcctttaaggaggtgattaattaaacgaggctgttagggtagatcctaatccaagctcaccggtgtccctataagaagaggagattaggacacacgagacacaccagggcatgtgagcacacaggaaagaccacattaaggtaccgcaagaggaaggccatttgcaagccaaggagagaggcctcaggagagaccagccctgcccacactttgatcttagactttcaacctccagaactgagaaaattgaagtcttggggaagccactcagtctgtggtattttgggatggcaacctggggcgactcgggctgggcagatgctccatgccctcagcacagactcgctgagctccacgaattcccgggcaccgtgcttggccctgaggatctaaaggtaataaagcttgggtggcattaattatggcagagctgcaaccgctccaagcctgagccaggctgagctactttcctttcttctttctttctggttcccggtgtacagttatgcatcatttaatggcaaggatacgttctgggaaatgccttgttagggaaatttgtcattgcgcaaacatcacagagggcacaaacacaaacctacatggtacagcctactgcacacctgtgctgtatggtacaacctactgcgcctaggctacaaaccaggctgcatgtgactgtactaaatactgcaggcaattgcaacacaatggcaagtatttgtgtctaaatctatctaaacatggaaaagacacagtgaaaatgtggtataaaaaatcagcacctgacctgggcgctgtggctcacacctgtgatcccagcactttgggaggctgaggtgggtggatctcttgaggtcgggagttcaaggctagcctgaccaacacggagaaaccccatctctactaaaaatacaaaaaaaacagccgggtgtgatggtgcatgcctgtaatcccagctactcgggaggctgaggcaggtgaattgcttgaacccaggaggtggaggttgtggtgagccgagatcgtgccattgcactccagcctgggcaacaagagtgaaactccatctcaaaaaagaaagaaagaaagagagagagagagagagagagagagagagagagacagaaagaaagaaagaaagaaagaaagaaagaaagaaagaaagaaagaaagaaagaaagaaagaaagagagaaagaaagaaattagcacctgaataaggcacttaccatgaatggaacttgcaggattgtaagttgcctggggtgcatcagtgagtgaatgtgaaggtctaggacattgctgtacgtgactgcagactttttttttttttttgagactgagtctcgctctgttgcccaggctggagtgcaatggcacgatcttggctcactgcaacctccgcctcccgggttcaagtgattctcctgccttagcctcctgagcagctggggttacgggtgcccaccaccacgcctagctaatttttgtatttttagtggagacggggtttcgccatgttggccaggctggtctcaaactcctgacctcaagtcatccacccgcctgggcctcccaaagtgctgggattacagttgtgagccatcgtgcccagcccaaagtaacttttgtttcaaaaaccaattatccctctgatgcattgtggccatcaagtttggagttgttgggtttctagggctctaaaccagaaacacctcagacccaatgaagacaaaagcatctattataatgttttcctgtgtgccctggggccccatccctgtgcccaagacaccaactttctgagctttctgagagcaagaccttgttcatctttctgtacaccaaggtcttagtacagcatctagaaccctagaagagtgtctagaaactcgtgtgtgtgtgtgtgtgagtgtactgaatgaatcaatgaatgaatgtctgtgtggagaaagccagagggtatttcagacagggtcccaaagtatgtgtcccttggtcagatcaccagatcttggggatcgcaggaactgccccagctttgtaggtacaaaagtctgatttataaatatacccaagagatggccacatatgagtggactagcttatggcaaccatacttacaagcgtgtacagaagaaagtcaagttataaattatacctttgtaactacaggcatatgaaaatgtactgctcccagcattcattggccagattattctgcctggcagccatctcttcataggacccccccgtaggataatcagagggttccaagaaagcctggacttttccacgtcaagggctcttttgcaatgtgactttgatacttctcccctcaagaggtagaatataattttcctccctttgaatctaggtgggtgctgtctgtgtcttgcgttgacttctgggcctaattcttcagaagcattgcaatttcatttcatccttttggaggctgaccaccattcagagaagctcagcctaactactgaatgtggacagtctacatggatggagaggcaatgggaaatgaaccaaagcacccccagcagggccagtacccaggacccacacctgtgagtgtgaggttccactcccattgagccacccagcagccactgcaaggagcagagacaggctattcttactaaacacaaccgtgaccaacaaaaggactgaaagtgatttcaagccacaagctgcccatatacaaaatggataacaaaaagagactcaaagcaagaggaagtggctgtattatattaattgttaatatcactgacttctgaaagtctgtcgcctcgatttccactttctctgctgtcccgatggtcaggctgcctctactccagcaagtccagagacacttttctgtttcagactctctgaactatccttttggaggtaccagtcacaccaatccccttcagaaaacacatacattgttgtcttgattcaattttaggccctgcttagttgtaaactgaaaacctcatttaagctactggcttgcttctaatttcctagtatttattgtctgccacaagccagactctgtcctaggagctaatgatacagcagaggaccagatagacaaatcccaggctcatgaaatttacattccagtataacctcagattgaagaagtactagctattgtcttcatataccaggaataaaaatatgacccaaagcataagtgcagaaagtacactgggccctagaaacaacctaaatagcatccagccctcagaattttatataagtcgatgaccaaaagtgattcctcctataattttgagataagtagtttgagattacccaacagatagatatgcacatagggcaccaataaaatagaggaaccaatgtatttttgtttgtgaaatttgatatattttttaaaaggatcaaagcagtcatcacaggaaaaaaatcagtattttatttattgcactacactttttaaaagtagttttaatgaattaattttctttttcttttttttttttttttttttttgtagagagtgtctcactctgtcagccaggctggagtaaagtggtatgatcatagctcactgcagcctcaaacccctgggttcatgtgatcctcctgtctcagccttcagagtagctgggacaacaggtgtgtgccaccatgtccagctaatttttacttatttttaaattttttagtattttttggtagagatgaggtctcgctttgttgccagagctggtttgtttgtttgtttttgagatggaatctccctctgtcacccaggctggagtgcaatggtgtgatcttggctcactgcaacctctgtctctggggttcaagtgattctcctgcctcaacctccccagtagctgggattacaggcccatgcaaccactcccggctaatttttgtgtttttagtagagacggggtttcatcatgttggccaggctggtctcgaactcctgacctcaggtgatccacctgcctcggcctcccaaagtgctgggattacaggcataagccaccatgcctggccacagagcaggttttgaactactagcctgaagctattctcccgccttggcctcccaaagtgctgggattacagatatgtgccacggtgcccaggctttaagcaacttttaaaaactatcatttttatttcaaatacttatggagatggtggtatgataatcttttcagtttgtaacgccctctaactgtgtaaagtagatctgaagtgttttcctgaccctcactgggatggttatttcaagtacaaaacgttttcacaccgtgggtgataatcttccataaaaaatttcatatttgaatgaaaacagctcaagaaatacactaatgagcaaaaatatatggggaaagaggaacgtgtagttttgacttaactgaagaaaccaagaggaaactggtctccatatgaaaatgtgatcctggaaagtcaggtgtcaagattttcgagtaggaatctacatgacttgaatctcccttacttcctgaataaaagtgacatctttcagtatttatttaaaaaaatcatatgtcagtggagcttccaggtaaattatctttaaaaaatcatatttgagtggagcttccaggtaaattatcttcctcttttaagggagctccctgtatttctagcggctttaactgatatccctttcagtgagaaatcctcattagctacataagaggggactgggtgtttttttcaaaaagctggtattgggacatctacctctgtgatgtccctggtcagctatattgtctaggagttgaaacattttgtattaattttctatcatttactgggtgcctcttctgtgacagtgccactcaaaggtctattgatatattatcaggtgactgaattctatattctgaagtaggagatactgttattgctgttattacattttacacataagaaagctgaggctctgagaggtcaagatcacgcagctaacaaatgagccaagactcttgctttagagcttgtcctctattcttgcttttctttccaaaaaacactacaatttttgttttgttttgttttgttttgagacagggtctcgaggtgtcacccaggctggagtgcagtggcgcgatttcgactcaccgcaacctccgcctccgcgcttaagcgattctcctgcctcagcctcccaagtagctgggactacaagctcgggacaccacgtaaaaatgatcaagttctaacatgtatgcatacgaattacaatggaaataaaattagcaaagcgcttatgctaatgctcaatacaattgatttcctcacatttaatcctcacaaccactacaaccacctctaactcaagctctgagggactgacgtgcccggaggacacagctcttatctggtgagaacaggagcgttttagcgaaactccaaactcctaggtcccgccttccccaggaaggcttttcctggcactgtgcttccggaagtcccgccccaggagaaaaacagcttccggaaaaaattgcggccggcaaaccggaacagaactaggggcggggccgcttgagacgctctagtattcctctactctatggccactgtcaattgacaagtcccgagcggtaaagctcctttctattggatgagcagcctcgcgtaggcgggaagctcggtgcacggcgcgctgattggctggatccgccatgcggagcggctaggtggtgcacgggaaacgcgggcgtaggtgaccggcggctttctcagttttggtggagacgggcgcatgtgggcgctttgctcgctgctgcggtccgcggccggacgcaccatgtcgcagggacgcaccatatcgcaggcacccgcccgccgcgagcggccgcgcaaggacccgctgcggcacctgcgcacgcgagagaagcgcggaccgtcggggtgctccggcggcccaaacaccgtgtacctgcaggtggtggcagcgggtagccgggactcgggcgccgcgctctacgtcttctccgagttcaaccggtcagtcaacgagccacgccccgtcccgctgggccctcagtgcggcgcagcctctgagcatcggggcacctcccagggcttcggcttccctgcttcacacatgtggttcactgttgcgggggttcgtggagttatggtgggtgggaaatccgagattctttgcatccatgtgatttctgcggatctgtgaagaacttcaggcctgggtctgagcgtccttttcccaacccttgggccccggcctggctgtcagcactttcggagctccaccctcttccgtgcaccccaaggccagtgtgtcgttgttagcgtgtggggtggacagatctggtgtgtagccggtggtggagaaaggactcattttgtcctagcacccacacacacaggcccccactcctctccacctctgctaaggagggctcaaaacccaccagcataaatgtggctcggtagtccaacgtggacttttaatttttttttcttttttttttttccagagtctacaataaaacatctaattggtgtcagagagtttacagaataaaaccttctgaatgtcttgtgtaatgtttgtcttgtaggtatctcttcaactgtggagaaggcgttcagagactcatgcaggagcacaagtgagtcagtctcttgctttcggagggggagttgattacggggcttgaaagccgaaatgagaggccagttgttttttatagcaaaagtggtccttgttctgttcatgttatcctgtttaaatgttttttcattcttaggttaaaggttgctcgcctggacaacatattcctgacacgaatgcactggtctaatgttgggggcttaagtggtgagtatattctttgcagtgtcagaggctggtgggaagtctctgggattttaaccggctttaccatttttccaagtctggggtgggcagctacttttttttttttttttttttttgtcagtggcgtgatcttggctcactgcaacctttgccttctgggctcaggtgatcccctcacctcagcctcccaaatagctgggaccacacgtgtgccccatcacacctggctaattttttttgtatgttttgtagcgacggggttttgctatgttgcccaggctggtctcaaacttctgcgatcctcctgtctcggcctcccagagtgctgggattacaggcatgagccaccgcacctggcctggaattctttttataccagcccagtcagcagcagcacagagcattaaaagctgtgactcaggagaacagattttaatatggataccacctcttaagtgttaccatccacttagtttcttgcgttgcggggacagagatttgtggcagtaaactggagagtctagcagtggtgattacagttaatatgtttaccgcagacgccattggcacattggcagccacacacatacccactgtccagattaccctgtcatttatgtctatcaaccggaaggtcaggattgtgttgcagccaaattgtgtgggcttggtggcatggaccggaaggagtgaagtgttagaccagtctcccttctcagggctgagactagggtgaggcacttagggtgccagcccttcacttgcatgattccttacattttgcacactgggtgccttgctgcttcaccctagtgacagctcagcccattctagaggcatttaaagaatatttggtgtctgttacacctctagctggcatcacttctgctctgtacatcttccctggttgtacttccaaagctggaaggtggagatgtagataaatagttggattagtacggggtgctcctcctgttagtgacgacaggtcaaattgatgagagatctgattttatgcatcctttttaggaatgattcttactttaaaggaaaccgggcttccaaagtgtgtactttctggacctccacaactggtgagtctttcctgacacatctttcaaaagcaatctttccttttgtaatatcagtaacaagaattttcctttttgcaaatcagtcttctgccctccagagatacctggtcgttgaaacgcttcccctttcaagttaaaaagacttgagttctgattaactatgtgaccttgatcaagttactttacctttctgagctttagtttattcatctataagatgactatcacgtttcatagagttgttaaagattaaatgacgtagcagcacatataaagcactaaatcactttattagatatatgtttggcaccaagtaggcacacaagaaagggcagcttttgtttttattcaataaatttctgacatcttcttacctttcagtccagcttattacactcttgagaaggcgtgtgtgtgttgttgaatataacagttcattttccagtccttaagaagaaagtcaccaagacctgttaagtctttccccaaaataacgtttgaaatccatccatttgtctcttattgaggccttccttatttctgttttctatgcctgtaaactacaatagcctcccatattcattctcgccttcctgtaatccatctgccacacagcagccagagaggtcacttcaagacagaaaagtagtgtgtcacttgccaccctaaagcccttcatgggctccccattgcaatacaatcaaaacaccttgatatggcctacaagtcctgtaggccccggccgctacccacacttccatctgtacccatcgctgaactgcagctgcatgggctgactcttatgtccctctaactccctggccacttcaggactttcgcccttccgcgggttccctctgcctcttctaattgctgcctatattgttactgaaccttcagggctcagctagagggtcatttactccagaactgcctcttcttctctagacaagttggatcccagccttctgtatttttcattttccttgcagagcacttagcataatgccactaagctgtttctgttatcgtgtttccttttgtctcctccactggcctgattagagcaaggcctccatctctttttcctgctatatccttggcatctgatataatggatactcagtaaatatttgtaataaatgatgttcaaaatatttactaagctttgttttatgttgatacctattggtaaccttttaaatacttgaatagttgctgtgttctacatttgttcaaccataactgctcatttctttgtttttcattaggaaaaatacctcgaagcaatcaaaatattttctggtccattgaaaggaatagaactgggtacgtctttgtctgtgactcatcctctgctatttctaacttatatatgccctgacctctcaaattagaatccattaaaaacatcaacatcaaacctcaaaatcaaatgcttcatcaccacgagatttttttttttttttttttttttggatagagtcttgctttcttaccaggctggagtgcagtggcatgatctcggctcactgcaacctccacctcctgggttcaagccattctcccacctcagcctcctgagtagctaggactacaggcgcatgccatcacgctcagctaattttttgtatttttagtagagacggggtttcaccatgttggccaggatagtctcgatctcttgaccttgtgatctgcccgcctcagcctcccaaaatgagctaccatgtggctggagatgggatttctaaatagtgacattttctgtgttcccacctcatgctgtaaaaataggggccaggtcggcaggagtgattgaacagctgatgcctgcctgtgtacatgctgtgtggcattctccatccagacggcagggctcctgcctcagttccagaggtgcttctcgtcgttgagttgctttgagttgggggcgggggtgacaagggttccctagaggttttgtggccaactttgtacattgaaacgcagctccagctgcgcaggggggcttacagcctcttgatgggaagaggcctcactgaggatgctagtagggctcttgtcctggcactggtgtgtatctgtggcttgttaatactcctcttttatagaaacactaatactttgtttcaaaatatacatcagctcttctggtttgcgatgataggttccctggcttcactattctgtttgttaacttgggtctctgaaagttgagtactagtttcttgtttttcaatttttaacggatagtcaccaaagattataatgtcttttcatctggctgtagtaaatataaatggctgaccaaaatacacttttatttatttcctaaaaatggtaatctccttagaaagtctggttttcgtgtcagattcccaccataattctgaggcaattcagttgctcgtggttggtgatcctgaagttactcttcccacacatcttcactaatgcaatcactttgctgttgtgtggttttcttgtagctgtgcggccccactctgccccagaatacgaggatgaaaccatgacagtttaccagatccccatacacagtgagtatgaaagccaggtttcccaggaggagggtgtacgtcctgagtaaagaaaacatggatgaaaatagaaactgaacacttgctgtgggcaccctgttttgtgttctgagcatgattagaaaatttagttgaggaatgaagatatggctcctgccctggcttataaacttacggatgtctgacttatgcctaatgatagtgattatgctttggaatattagataatcaagcactgttggtaaatagattgcattcaagtttgcacattcattgcttggaggttttttcccacaggcgtaataccctcttttgatcagacgatcatgaagaggtttgcacagatagatttttttaaataaataatgattacagcaacctaaaagaagtgttgttgggggttagaagctcctgcaaattccgaagtatcagggccagatgatgtggtcttagcttaggaaaagagttagtcttgtccttgaacttggctaaagacattcatgtctggttttacttacatgtgaagagagtaccaagcagtaggggtatttccttgttagtactaactaatgtgatgcttactaagtagtgctgatgggtgacagaccagagcacccagcaaaggccagagaagtccagaacctggcgaggagatgaggcttacactgactgaaggcagaaggcagcagggaggagaggaatgtgccggagcaatggcacaagtgctcctaggccagtgctgtgatgagctgatcagcactcccattgcctggcttgctcctcctgctcagatgccttctctcacctgacccctgctgtagccacccccagcctgagttgcatccacctgtttgttgtccatttccagcaccctgttcttcgctccatggcatgtgacagttaactttcatatgtgatttgcgtgatcgatgttaacatgctcagttttgccgatcactgttttttcagtgtccagcggccctcagtgagtgaacttacgttcattctcgttgcagctgtgctttagcttcttagagcagcgaatttttttcccttgatcttgagccttaactaaatgtaaaatgaggctccttcttgagataggtaccctttgggtctatgtgttttagcgggagtgatgataataaataagcatgtctacaacccacatgctgtttagataacacgttgttgagttggtactgtggccgaggctgtgagctaagcagaaacataaacattaataggacataggtgcagcccagaaaccaggtaggaagttaactaactagttatttcctactgtatagtaaaaggtgtgctgatttaattggcgttctggcattcccatgtatgaacgtctgggccttggctgtcagctcaccttgtgcagtgtgtaatttggtggtatctgtactgaccaggtgaacagaggaggggaaagcaccaaccatggcagagtccagaaaggcctctcagcaggctcagtccagagcgatcttcagactccgagtcgaatgaaaatgagccacaccttccacatggtaatagtataaacaaaacagagcagcagaaaggcttgcgttttcttaattctctgccttgtaatgcttgtagagagtcattattgtaagaaagccaggtgtgtaaacagatccttcttcctgggcttactataacttggcccgttgggggaatgagaagggttgttgtaaaggtggcagcctgcaactttaataatgaccagtccacagttttggccacccagggtctgggtaggcccaaaactgtgttctgttttcccagaggagaacagggcctgacaaacggattcattttgtatttttcattaatgtaacatttatgcaaattttccattaatgtggaaactataactgctaagccaatgagacagtcaaatcagtgagaggctctgcacgtcttccagaatgacagcccactgggaaacggagttaaaagtccaagatgagatgtagctcaggagtcaggccgcttcgggagtttgttgtccttaacagaaggtcagcgttggcaaagctcggcagctcctctttctgtcctgaggtcttgtctagtgactgagaacaggctgacccctatgtgctgtccttgtttggatggcaccgggtaaagactgacaccagcattttctctgcaggcctttgaacttttgtgttatttcatatattatatgtgttataaagcacattacaatatatttttctctgtcttctccagtcctaggtgaaatgtgtcatttaaaaaaaatttcacttgccattctaaagtttttctggtgagagttttgtgtttttcatttacgcaaacacatctccacataagtagggaaaaaaagtcttcttgagtatattagtgtcttcagcctttgtattgggacagtagcgtccattaatttttatgtgaagtgaaattaggtatcgggtcataatcagtctgtgatgtcttcacagctttcacatttaccttgtgataatcaagtgtgtttttcctcaggtgttagccagagaagaggggtcagggactcttccctggtcgtagctttcatctgtaaggtaaggaagactttccggagggctgtacatgactggggtcttggtcagcgacctctggtttgcactttttcattaatttgagggtaggcactcctgttacctgagacaagaagagatagcagatcttcagaaaagctgatggaaggccgggtgcagtggctcacgcctgtaatcccagcactttgggagtccaaggcaggtggatcacgaggtcaggagtttgagaacagcctgaccaacgtggtgaaaccctgtctgtactaaaaatacaaaaattagctgggtgtggtggcgcatgcctgtaatcccagctacttgagaggccaaggcaagagaatcgcttgaacacaggaggcggaggttgcagtgagttgagattgcaccattgcactccagcctgggtgacagagcaagactctctcaaagaaaaaaaaaattcgatagaaatgacactggcaatgagcctgcaacaagtattactactgacctttcataattgtcatcacttgtaggtttcagagtttagatgctctgtttctcaaaataaccccatacttttatttccttttaaatttttttccagtgccctgtcagcctccgtacattttttttttttttttttgagaccatgtctgtctccatcgcctaggctggagtgtgcagtggcacaatctcggctcactgcagcctccacctcccaggttcaagtgattctcctgcctcagcctcccaagtagctaggattataggtgcgcgccaccacacccagttaatttttgtatttttagtagagatggggtttcaccatgttggccaggctggtttcactcctgacctcaggtgatccacccaccttggcctcccaaaatgctgggattacaggcgtgaagcactgtgcctggtccatattcttttatatttgccaatgattggtccttttagaattcagaaattattgaaggcagctgtgtttgttttccttcaactccatcaggcctttattcaaagtcttttaactctgttttactttatttcattcccctgcaatagctaaggtctaacaccagattaattggaatattagctagcattcacaaaggcctagatctgtaactctgaaattggtcaaattccattaaaaatttttgttacaataagctgtttgtaagatctgactagtggcttatttttaatagaattttgcattaaaattttatcaatacaatttgcaacaaatttgtctaaatatgtgaaaagatttcattgcctttttgtgggcttagattattttttaatgttgattttgaaatatatttggaattgttatctaaattctaaaagctacaagtgaaaataataatgaaagtaagtagttaatattagtggcaagatcattgccagtatcatttctatcgatttatttgaataatgtgattttcataaaagttaagtactactgttaacaggcttattacttgtatgtttctgagttttagatagcaaaatcattttttaaagttttaaaaatattttatttttgataatctatatttatattgtctgatttttaaactgttttctatggtaatctttaaatcgtattcctgctttccggaataggtaacagtgagcatgatgaaaagtgacaagctcacttttacacactcgggcagttgccctattatcaggcagccgttcctgggggctgccagctgcctgccctggcttttccatctccttccttgctgtcttctgcggctccttctgagggctgctgtcactggattagcctataacgcctttcccctcttctaattaatttgctgctctcaggtgaggttttggaaagcaataaagctgagctaggtcaagttccaggagtctcttggcatgaggacctgaaaaactcatctgttggaagacctcggctttgggcagctggtgcactgttggggcgttattggctgcgttctggctctcatcagtcttccagatactctgcattcctcagagaggaacatatctccatgggttgagttcagctcccagggagatgggtttccctgccttaagtcggcaagtacctttttttttctttttttgagacagagtctcgctctgtcaccaggctggagtgcagtggtgcgatcttggctcactgcaacctctgcctcccagggtcaagcagttctcctgcctcagcctcccgagtagctgggactacaggagcgcaccaccatgcccagctaatttttgtatttttttagtagagacggggtttcaccatgttggccaggatggtctggatctcttgatttcctgatccgcctgccttggcctcccaaagtgctgggattacaggcgtgagccatcatgaccagcctttatgtttctttgtttgttttgtttttctgagatggagtctcgctctgttgcccaggctggagtgcagtgttgccatctcgacttactgcaacctctgccttccaggttcaagtgattccttgcctcagcctcccgtgtagctgggatcacaggtgcctgccaccatgcccggctaatttttgtattgttagtagacacagggtttcgccatgttggccaggctagtctcgaactcctgacctcaagtgatctgccttcctcagcctcctaaagtgctggggttacaggagtgaaccaccatgcccagccttcaattaccttttatttattttatttatttatttatttttgagacggagtctttctgtgttgcccaggctggagtgcggtggcgcaatcttagctcactgcaacctcctcctcccaggctcaagtgattctcatgcatcagcttcccgagtagctgggacttcaggtgcccgccaccacacttggctaatttttgtgtttttagtagagacggggtttcaccatgttggccaggctggtcttgaatttctgacctcaaatgatcctcctgcttcagcctcccaaagtgctgggattacaggcgtgagccactgcccccaacagcaagtaccttttaaacattagagacatttagttgccatcctcaaacccgtttgggtgtgtggagagaatgttgggtcgtgacatggttgttagttatctaaagatgtcagccatcaatcatcactgtgtgatgtgcacactgaagctgtaatccttcatctaggatgatattttttaagatggaaaattctacaaccctgagaataaggatttcagatccaaatttgagactcagccctacgagtaactctttaacttcagagagttaaaagaagatgcacagttgatgaagatttaaaggagaaaatggaaatcaaatgtcatttagcactcaaaggcctacatgtcatttctgacatttttctgtttgtgtgaaattttttttttcctataaaatgattgtgaagttttctggtagaattattgtttgcctttctaatgtaatagcatattagggtttttttttttttctttttctttttttgagacagagtctcactctgtcgcccaggctggagtgcagtggcacgatctcgggtcactgcaatcttccgcctcctgggttcctgcctcagcctcccgagtagctgggactacaggcgcacgtcaccacacccggctaattttttgtatttttagtagtgacagggattcaccgtcttagccagggtggtcttgatctcctgacctcatgatctacccgcctcggcttcccaaagtgctgggattacaggcatgagccgctgtgcctggctattagagattttttattataatttatctccaagataaaagcagtgacattatattgccacataattgaaaaatacaagagaaataaaaatcatccatgcttttgttagcctatcactgtcattgaaatattatgttacatggcagtttgcttgctggttgctctgttaggcaacgctctggtgacattcctttagctattaattgaggaatgtagaatgacagaacagtgtttctcctcaatgatacttgaaggatatttattaactttcatattgaattacattttattaaatttataatgagttaatgctgggaaataaaacactgatttaagtcattttggcttttagtactaaagcatttgacaataaatgacttcttcagaatatggtataccttctgaaagcaataaacgcattttaatgaattgtaaggaaacaacatcattttattttttatttttttttttgagacagactttcgcttttgttgcctaggctggagtgcaatggcgcgatctcggctcactgcaacatccgcctctgggttcaagcgattctcctgcctcagcttcctgagttgctgggattacaggcacgtgccaccacgcctggccaattttgtatttttagtagagacggggtttctccacgttggtcaggctggtctcaaactcctgacctcaggtgatctgcccgcctcagcctccgaaagtactggaattacaggcgtgagccaccgtgcctggccaacattattatttttttttaatctagaaaaatacacttctaagaaaattgattaaaaccaaccttcttcattagcccctaagatcacatctatgttctctttgttgcagcttcacttaaagagaggaaacttcttggtgctcaaagcaaaggagatgggcctcccagtgtgagtgtggggggtaaggcttctggggactcactgggtacacctgtccacttaaggaaatcacatttcacagaggccttgcctcttcatttcagtgggacagctgccatcgctcccatcattgctgctgtcaaggacgggaaaagcatcactcatgaaggaagagaggtgagatgcctggttttcttgattcagcagttacaggtagggtctgaaatgctgggcagagtctgtcttcttcaggccctacagacaccacttttgaaggacgtggaacagtttggacatcactcagctaagtgataaaatggcctcttttatctgtgtttgtcccgcatgtcaacacggctgcattcgagcatttttgtagattgtccatttaggatctagtcaccgtcctccttaaagggtgcatgctttccttggtacttgagctcaggacagtgtctaacaacagaccccatatggatgggcctggggtttatggtccagaggaatgccacagtattctatgtcaagatatttcctctgacttctgaggacattaggaccagtggccacagactgaagaaaaccttaatgccaagcctcctttcctggccagtgtaggcctgaagtgcctcaacctgacagttacctgtttaggtatccacaaagagaccagaagggtgttgatggtgatgtgtaaagttggttttgtgctttgtttacctctcagctcactggataggatatgtcatgttagcagttgccttgaaggcagttcagtttggtggctgagctgtgacccccagtgggcgggcttatttggttttgcagattttggctgaagagctgtgtactcctccagatcctggtgctgcttttgtggtggtagaatgtccagatgaaagcttcattcaacccatctgtgagaatgccacctttcagaggtaatgaggggtctctagggtgggagaagtgagagctgaaacccagcccagcatcgacatgggcatcttgtggcaagagctgtgtttctgggaagaccactatctgggtttacagttcagaggccggcactcctgccttaagtcactgttggtagttggtgggctccggtgtacacagcctcaaagtgaaattagaaaagattgaaaactagaaacaactgaggactagaaattcaactagaactcttacagctcttataccagaagaaattctagaacttttttgaattctaactaatgccccagattatcatttggattattttgaactgaattaattttcttccattacctgcattgaaacaaatgaggtgggtcagagtgtgtgagactgtcgtggtcaagagtccgtgttatgggatggactcacagctggggaatgtcttttgggctaactgccactctgttgttgtcctctatcgaagttaaccagttttgcggttcagctttcattccagatggaatcatctttgacccacctatctgagtttgaatcttttcccccactcttaatggtttacctgtatttttcctgttcctagtttgtatctatctgtattttttcacttgtttttttctacttaccacaacaaatccttttgggctgctgtaccccttccgagtcagagcgttaggagttgtttcatggtctgctttattctctgtgggtgaatttggatgcgctggtagccccggctttgtattttaatccagttttgggcagcaaaacctcttcaatgaatcaggtgtcatttgagagccatgtgtggatgtgtgatgatgctgggatagataaaaatagctactgtgtatatttctttttaaagggaactggagggaaacacatcagcatgttagtaagtggtctgttgtccaggtggtgaaatttcagatgattttcatttctcgtgcctgtgtctcaggtcctctggaaggcagacaccagggtggcattggaggtgcaggaggtttattcgaggaaatttgactgtgagagaggaaggagagagggagcaggaggaggcagggagagcctgggtctggctttgcaggttggacccgtatgagtggagagggtaggaaggaagtgcagtgctgagaaaggatcagccaggcctactggaaagcccagagcagagcttgccagatacaggaatcccacgtccattggaaatggcccagcaccggggtctgccgtgagcagcctgctgtgagagcatggcctgggcgtggaggctgtcagctcactgcagtgctgcagagggccgcacgatacccctccctggctgcgtggtccctgtcttggtgtgtcctgagtctgcatcactttgtaaagccccactcttctgcccaggtaccaaggaaaggcagatgcccccgtggccttggtggttcacatggccccagcatctgtgcttgtggacagcaggtaccagcagtggatggagaggtatggagcccagcccagcggcacttggggtaactcttctgggcagtggtggattcccctttcctcccctcgtgctctttccagcgctacctacccttctgcacctgcctaaactttctgtgggattcctgccttcccagaattctaggcttcccagatctgtgctacactcgtgaagaaaatgcaccgctaggtggcgcagtgtccacacgattccatttattttacaccctccacactcttcagggtgtctgaacaaatactgccgtttggttgaggattccataagtgaattccaaagaagagattgcagctataaaatgatagcttccatttactgaatgcccactttgtgggaggcagtgtgtgaaatacccttcatttcacttcatttcctctagggtcgtcgccagcagccctgggaggtagatgtttagtcactggaaggcatctttttcctcggggcatcgctggccagggccaggtggaggagtatgagttgagctcgggtgcggggtgaccttgggctgctttttggcccctgcccgtatctccccacatggcccgtttacctgcccctcactccatggcctgctctcctgctgtctctttcattcctcagggtttgggtcccctatttgtatgccctggacatcttctttttcttgtttttcctctcactcttcccagcacacctgaaaggcagctgagctagggaacaccgggctttgagacagcaggagtgggaccatgtttggccatgtagtaacactgcttggggcaagtcactgaactgtttgaacacctcatcctcattaccactcctgagctcagcaccactcctcagggggagctgcctcctaacagacgctgcaaatgccgggtctgtttcttcacaggtttgggcctgacacccagcacttggtcctgaatgagaactgtgcctcagttcacaaccttcgcagccacaagattcaaacccagctcaacctcatccacccggacatcttccccctgctcaccagtttccgctgtaaggtagtgtctcagaccggccccttgtcggcccagctctcgtcccctctctttctctccatgaatgtgttttgtctctttcagaaggagggccccaccctcagtgtgcccatggttcagggtgaatgcctcctcaagtaccagctccgtcccaggagggagtggcagaggtctgtgccatcttgaactaatggaatcgtctcagtcgagttgggaaacatttctgtaaatagccacatagtaaatgttccaggaggctctccagaccatatggtctctgttgtaactattcaactccgctttgagcacaaaagaaacacggacaataagctaatgaatgggcttggctgtgtgccagcgtgaatttatttagaaaagcagcctactccaggctgggttgaggtgggcggattggggccagtagttctccttttccaaaattgccttgcatgggaatagcagtgatagagctcgtgtgtttcacagtatagaaaataggaaatgtgtgatgaacaaagtcacccataatcctgttgcccagagataatgattgataacattttgtgtttcttgatttgtgtatgtgggtttatattgtcagtcttttcctgtatcactaaacagtcttaagtaacaagatttttattggtattccaaatagggatgtttactcatttgggatgtttccaattttttgttgtttttaatgaatgaaacaataaatgtcttatatataaatctttgatgggaactctgttcccttcaagtcattcctaaatgtgggattactggcccagagtgtgagacttgttaaggtacttgataaatgtaagatgccatcttgaaagcctcttccagtacaatccaaccaggaaagtgaacagccttactgccccacatctttattttaattaattaatttatttattttatttatttatttatttttttgagacggagtttcactcttgttgcccaggctggagtgcaatggcgtgatctcagctcactgcaacctccgcctcccgggttcaagcatttctcctgccccagcctcccgaatagctggaattacaggcgcctgctaccacgcccggctaattttttgtaattttagcagagacgggtttcaccatgttggcaggctggtctcgaactcctgacctcaggtgatccacccacctcagcctcccaaagtgttgggattacaggcgtgagccgtgcccggcctgttttaatttttaaggatctgaaccttgattttaagtttcctgcccactccacagtatttgtattagaatagagcatgtgctggattatgactggatgctgtgtgctgttgaggttgggtagttggggccctttaagagactatactagcaagactcgggcccacaggcaacatcacggggttgaagaacctggtgtccctttgttggcatctgcgcaggctcttaacacacagcagcgatacacagccctagccgacattcagatttaccttgtgcttgtgaaaaatattgcacagggcctgccctagacctagtgaattagaatcttgagagttaggcttgggactcacaagctcccagatgattttaatgctcagcgaggttgaagagccgcctgtccaaggagttgccactccgtgtgatctggggcttgctaggaaagtgggatctcaggcctcactgcagagctgccgaactggcttctgcgttttgccaaggttcctgggtgtgaacatgagtttcagagtcactcctctagggcccctgcttctcagctcggaccattgacccctcagaggacatttggcaacatctggaaacgttcttggttgtcacagcctaggaggtgggtagtggtgctgctagtgggtagaggtcaggggtactgcaccaggacagcagcactggccacagaaaaaaactgtcttgccctgagcatcagtagttccccgttgactggccctgaggcagagcgatgcagcatccaaaaggcggtggagcagacctgccccagatcctagtcacttaaccttcagtgttgatctgaaggaacttcctgcagattgtccccctgaatttattctggacatccccaatggggtctgctgaggccatataccctgtccgtcacctgagatgcttctctctcttcctgcagggatgccattattacttgcaatcctgaggaattcatagttgaggcgctgcagcttcccaacttccagcagagcgtgcaggagtacaggaggagtgcgcaggacggcccagccccagcaggtgagtgggagcccacagagcagcctttctttcctgggctctgcccctgctgctgttttcctagcattaagtggagtgctggtggggcgcattctaacctggcttttcagtctaatccagggcttctctactcagctctacattagaattatagtcattggaggagggggctttggggagtttaagaatcccaattcctggctgggcgcggtggctcacacctgtaatcccagcacttcgggaggccgaggcaggtggatcgcgaggtcgggagatcgagaccatcctggctaacatgatgaaaccccgtctctactaaaaatacaaaaattagctgggcgtggcggcgggcgcctgtagtcccagctactcgggagactgaggcaggagaatggcgagaacccgggaggcggagcttgcagtgagccaaggtcgtgccactgcgctccagcctggacgacagagtgagactccgtctcaaaaaaaaaaatcccaattcctgtgccccatcccacccaatcagagcatttggcgatggcacccaggcattcttggcaaggcacgcactgagtgaaacgttttagtgaacacctgtggaaagagctctgagcagggacttggctggcagagatctagtcctggctttgcggatgcaaatccatggaggatcttggccacgtcactcaactgaggctgagggccgggcacaggctttggaaccatcgggtctccctggatttgaatcctgaccctgcctcttaccatcttcactggagacctgggcgtctgagcctgtttcccccttgggaagcagagcatttcctacctggtagggctgggaggatgcgaccgaagtgcatggtcttgcagtgagagctggatgcaaggcacacactgttctcttgaaataaatgacagttcccagcataaagaaatgtcattttttaaatgtaaaagaattacagcaattcttttgaagaaaggactggagaatttatttgttcttcttagccttttggtgacagatagcctgtgggtcccacactggtgcgaagtcctttgtttcagagcggttgccaggggcctgccagtccccctcctgggaagctggatagaactatgttgcttacccatctgtcttagtctgtgttttgttattataaaagaatatgtgagactgggtaatttatcaagaaaagaggtgtatttagttcacggttctgcgggctgagaattgaaggtcacggccctagcttccagtgaaggcttccatgctgcatcataacgtggcagaggagcgcaagtaggaagtggacgcttgtgaagacgggataacctgagctgcactctggctttataacaacccccctctcctgggaacaaatccattcccttgagaagtaatgcagtctcctgagagccagtacttactactgcagctccaagccactcaggagggtccgtccctgtagcccaaacgccttccactaggccccgcctcccaaaaccgccatactagggagcacgtttccacatgaggtctggggacaaaccaatgacactcaaaccattgcaccttctcatggctgcatgctggctcacttttgacccaaaggaatggattgtttcacatggattttttcacagagaaaagaagtcagtacccagaaatcatcttccttggaacagggtctgccatcccgatgaagattcgaaatgtcagtgccacacttgtcaacataaggtatgctgctttcccaggaagcatccttccatcaagggcacgtttactttttaaacaaaagtcctgctgtactcaccagtcgatttgaaatgcggtatcaagccctgtcacttgtcatgtcgactggagtgtccaggagaggagcgtggccttactgcattttatagcctcagtagcaaactttaccctgggaatcaccaaaattcatcccatgatgtcttttaataaacagctgattttactgtgggcagtacacctagctaagaaattagctcctttaatttttacattaatcctatgaagtggtgaataactacccattttgttgatgagtgacctgatattcagagaggtgacttgctatggttcctacagctggtaagtggggcatctgaagtttgagcggggacttggggtcttgattgctacatggtattgtcccccagccatttgttggtagtatgttaaaaagctttagggttttgcacatttgtgttcagaacctttattggattccccttgacatgttttttagttgattctcttgggtttgcctggggtcatcagcagagagattagtcaaatgcgttgtgacatgtacacgttatctctacagatagtatgtgaagaaaataagattgtgaattaccaggtttgttttaaattttgctctgccatcttacatgctagtggtggatgataaacaaccaaatagtgcattaaatatatacagcagtgacgagatgtgccctgacatcagaaatatacaatctggggtgtgtttctctgtggatgaggacatgcaataaagcagcttggagtgagccggcctctcccgggggctgagatcctgggggaagaagggctttttgagtttgacctgacaccctgcgagcagcttttgaaccagctgaagctaatgggaaggtgctattgccaccttgcctccgcctcccgactcctttttcccccagaaggtaatgtcttagcaccggggcttctctctgcaaaatgggtgcagccctctcagtgttcgtggctcctcccagagaatgaaggaggccagagcgggtcagcactctctctgccttggagcagagcttctgaaatggactgcacagcagaatagcccaagaagtttgtcagaatccagacttccagagccctgcctaaaaccaagtcagaaaccccgagtgacacctgggagtctgcgttaactggctccctgaatgaagcacctgcagcccgccctgcaccaggtgtctttgaggacatgagctgaggaaaccccgaccacttgcaaagggggaaaagtccgatggcagctggacctagaaagagtctcatatggcccagtgcctgtcctggtattttcaacagaggctgtggccacagtcaatctgcatggtcagattcattgttaggactaaatgctttaagcctcctataaactttttttttttttttttgatgcccagcctttgtgtaagtctacttgaaagggtttcagggttccatggatacttctttgctataaagaggatgacacatgtaaaatcacctttatggttaaattaattggcttttatattagctcctcaaagcaaagcaggagagacagaaatttctgcagttgcttcttggtcctgtccaaagcagacatcagcctctgaaccatcagcagtcttcctagtggcagtgactctcttcctcttctcttctgcagccccgacacgtctctgctactggactgtggtgagggcacatttgggcagctgtgccgtcattacggagaccaggtggacagggtcctgggcaccctggctgctgtgtttgtgtcccacctgcacgcagatcaccacacggtgagtgttgggctggaccacaaagctggagcctggaggaggcactgccacgttgagttggccctttggctgcgtcttttcctccgcttccaaacttgcccagagcttttgttactcatctctggctaggaaatggttttttgcaaaactcaacatagtccttctgcgccacaagaatgtcttctcttcctgttcagttcctttcctgcagcaggacaggtttgagtttacccagccttccttgagtcttgaatctcacacggcctgctcagcggaagctttgaccggatgcaggaggtgtggctatgagaccctcaccttggtctcctggggtgccgggccctgggccgttgccctcttcccagcacgggtcgtgtcgctttctgcctgtgacatttcagggccatggcgcagggggctcggcctgtgccacccccactgcggctgtgttagaggctggtgggtgacgtcgggctggcaactcctgcaagagagagggctgcagaccctaacccggaggggatggccctggggcctggctgacgcatgtctcctgtttccttgccagggcttgccaagtatcttgctgcagagagaacgcgccttggtaagtgtggcacttgatgggcgttctgagtttcagcggtttacacatcatccgccatgcctcttggcactccagtttttattgagatgttctgtcgtcgagtcggcacttgcattttttgttccaggcatctttgggaaagccgcttcaccctttgctggtggttgcccccaaccagctcaaagcctggctccagcagtaccacaaccagtgccaggaggtcctgcaccacatcaggtgagcatccagggcagcctggcccgctgggctgttgcttgctgccgtctccttcagaagctcaaggtggacactggggtagttaccaatatcccccagcagccttgcccttgacatggtcccagatggcagaagcaggggagaagtgcattggctgaaggacagaaaccattagatagttcccatgtaatgcttattttcttagaagcatttcttcccagtcctcatttgagttctgagctgctttctaaacttcgagcagcttttcttgatgagacagttccagagccaagcacccaaatagtggctagcacagagaatgtccatagcaggtgtgtggctagctggcaggtggcaccatcctcaccccaaggggaaggagtcccctctgctggagccatccgtggcccgtgctgcctgagccggaggcagcattcacctgctgggtttctcccagtggcctagaggctttggtttggctctttatatttgactgctgtttcctcatcatagtgactatgatttaactcatgttttctcctaagaatgattttggggttctccagccaaagacttaaactttggttccagatgtccaagaaacgtttattatcattttaaatgttttgtctttttacagtatgattcctgccaaatgccttcaggaaggggctgagatctccagtcctgcagtggaaagattgatcagttcgctgttgcgaacatgtgatttggaagaggtaaggggcacagccgcaggcatcatgggggcgaggtggggagcagagctgcagagccctccagccccaccctttcagtttcagacctgtctggtgcggcactgcaagcatgcgtttggctgtgcgctggtgcacacctctggctggaaagtggtctattccggggacaccatgccctgcgaggctctggtccggatgggtgagtagaggaagaagcaagccaccctgaggttgctctggggtttgtgtagctggaggtgaatgcaggtgggcttgcagggaaacgtcagcagaggcaggagactcaggtccccaccctcagagtctctggttgtcatcctagtaggcagacccagggccaggggagctgagtgttgagaccaggaaacagcacgtgactgaggcctgtgtgccgctctcgcagagaactctgccctgatccttgtgctgcttctccagggaaagatgccaccctcctgatacatgaagccaccctggaagatggtttggaagaggaagcagtggaaaagacacacaggtagcaaaggccggtcagtccttgtcgcccacatcctctccctcccccactacgtgacactgagcagccgtcgtttgtctccactgatgtggggctgccctgcttcctatcaagggctatgggggcttccttgacctgtggcagtgctcacaggctcttggcctttatttttgcagaattttctaagcaagattctagagtgaggcacagttttttgaaagcatctagaaatcggctgaataaactataagccatgtcagggaattgccaggggaaggcgggggctgggggactgaatttttggctgctaatttcaacgaaagagtgcattaccccaggtgggccctgtggtttctcttgggtgccctcatggacagatttggcagccagcacagagggtgggcttcatccaggggtgtgtgcgaaggctctggccctcaggggagattgtgctggctacggaggtgcccgttaagaaaacccaccagcttccccgggtgccctggcagttgatggccagggtctgtgccactgtctgctttgcagtcttgcagttgagttcagcttcagtctgctctgtccttcacctgcagcacaacgtcccaagccatcagcgtggggatgcggatgaacgcggagttcattatgctgaaccacttcagccagcgctatgccaaggtccccctcttcagccccaacttcagcgagaaagtgggagttgcctttgaccacatgaaggtctgtatgtcacacggacagcacagggcggggacggggcagggagacaggactctacacactgagtaggacggtcagctggagtttgctttcttatttggggccaccgtgggaaaaggttatctacccatcactaaccaggtcgaaccaccctgggtttgctggtgagacccacctcctgcaggggccaactagtcttcagtctcagttcactggaaatttctgagaatccttttaggcctggactgctcacacagtcatggcatttgagcctcagcacagacctgtgagacaggtggttgcctcttgtgagtgggaaagccaggcctgacccttggccttccggaatgaaggggcagagccggagccaggcctcgtttttcaggagcttgattttgagagcatctggactgctctcccttccctctccggaggcccttagccaggcctggggagcctctgcccctttagagggttccctccatgccattcttttttccatttcagctgtggcctgttggcttgtgccaaggaaggggcgttggcgctgctgtgtgagcacatgactgcatcccttccagctcctgtcccccacccctgcccctctgagacatgtccttgtcttctattgtgtcttctaggtctgctttggagactttccaacaatgcccaagctgattcccccactgaaagccctgtttgctggcgacatcgaggagatggaggagcgcagggagaagcgggagctgcggcaggtgcgggcggccctcctgtccagggagctggcaggcggcctggaggatggggagcctcagcagaagcgggcccacacagaggagccacaggccaagaaggtcagagcccagtgaagatctgggagaccctgaactcagaaggctgtgtgtcttctgccccacgcacgcacccgtatctgccctccttgctggtagaagctgaagagcacggtcccccaggaggcagctcaggataggtggtatggagctgtgccgaggcttgggctcccacataagcactagtctatagatgcctcttaggactggtgcctggcacagccgcgggccaggaggctgccacacggaagcaagcagatgaactaatttcatttcaaggcagtttttaaagaagtcttggaaacagacggcggcacctttcctctaatccagcaaagtgattccctgcacaccagagacaagcagagtaacaggatcagtgggtctaagtgtccgagacttaacgaaaatagtatttcagctgcaataaagattgagtttgcaattgtgagttcttttgcttcctcctgctgctgctacagagcagggtctgctgtgcaccaccttggagaaggctctctgtgctgtagtgtggcagctgcctggtacccgggtggcttggaagaagtcagctcccgtcgtagtgagcacctctggaacctgtcctcagagagccacccttattcgccaagtctttttgacaactcgagctgtgccagctcacagcagggcgtgctttctctatcaatcaatcaatcaatcaatcaaatcaatcagtgagagcctggctgggctggtgtcattggtcagggaaatgcaagtcttctggtggttctgggtaaaagtggagacaatagatttgctgtgttgttgcttccatactgagaggagtgaggatcactttgccctcgaaggttttgagaaatggcacacggggctggtttccattgtcctccttgcgggatttacagacgtggattagtgctcgacaaatggagagcattttccaaggaagtaagtaagtaaagtaagtaagtaagtaagtaagttgaatctagtatttattgtgtatattccctacccaggagaatgtaaaaagaagagctttaaaaactcaaaagacaagcaagcgagagatcagccagggacctggctttacacaggtggtgaccttcaggctccatcccggtgtgcatttgagattgacggccatgtccccgcaggtttattaaagcaagaacagatgccaagctcagggataataaatctattttaataacgttacttttgacaacgatttgtacatgtatttaaagataacaactttcaacccccacccttaccccagactcccattacaaattgaggcatgacctgcccttgccaggaagtgagcaaagctgcaacatcaaaactctgcacatcccactctcagaggagggtgactttacactgtgttgggaaaaataactaagcatttaaatttttcattgtacacctgtacattggtttagattgaatggctcaaattaaacaaatatagagagatttcatatatacaaatattatatcatgtataggtatattatatcatctatttgaaaaggataaaattttaaactttgactttgcatgcatggcccaaatcttttctcactcccctaatccccaagtgtgaaaaggctacccggtgccctcccggccctcgtccccatgaccagatgggacttcatgagaaggaaatgagcggctgacgctggtgagcaaagcaggccacaccgcaggccgagcccgtgggccagcgtctccgtggctggtttcacttttcctccacatgctttgggtaacgtaattattgctattcagtttgaacctccagaaagaagagacaggctccaggaccccacagactagtgaactgggtgcctttaggtacgtagaggggtaaaattactctcatatagccaatatatttggggacagggaggccacctttggctcctccagacactgtcaggcttgtttgttttgttttatagattcagaaatataaaatgatataggagctttcagtcacacagtggaaaaaggaaaactgttaggaagtgaaacatttttgttttcagccatttactttggagcccactgatgggggcggcctgaaaggttttccagtggcaagccctcccccaggtagctggcaaaggtcagtgccccaggactgctagaatcctggacctggtccagttgtgggtgagaggggccctgctgtcctgcttcctttctgtggccattaaactgatcctgcaagacctgacatgagccgtccaaggaaaaggtagcagcccttgggtctaaccaggcaaagtgagcctctcccgcaccaccccgaccctgcaaaggacgttcctgaccagccttggatggagaggtgggtgttttctggcatggaggctgaaagtggatcaaaagaggcacaaagtcaaaaggcaaaggtcaaacaaaaggccgaagtcaccacccgaaaggaacaaacaaaacctgcaccaccagcatcaccacacggactggagatcacaattttctgccaaattccaacctcgtgttggcagtggcaggaaagagccagcagagaacacttggcaagctcatggacgctgctcctggcggcgttcctagggcccgtgatgtatgtacacgcgaggcaggatgggcggtgtcatgtcagagggcggtgctctcagactcctcctccgagtccctcttgtcagttactgagtgtcgccgcatgtgctccaggggactcaggcggagcgtcgacccgagctctatgtggatcgagggaatatcaaagtggacaagatctggaaggcggcagagagagaggtggttgaaaggaggcttcccggcaaatgagaacctagttgtaggcaaataatgtcagccttaggaggcaggggtgctgctattctagggatagatcatttggaggttggtttaagcattgtgttgcacagtcgatcaggttgtgctcatgcctgctttgcttctaccccataagttcgtagaaccaaagcacccaggatacgccactgtggttcagaggaaggccagaacagcactcccctgccaagccacagggtcctttattcttgataagaaggatgctgagtaggtctcaatgacacctttttggggatctatatcagacgactgcatttcattccccagaatctgcagggacaggacgtgagacagtggacccctttctcctctcaagcctgtgagagaatggggaaccctgagccagtgtcctcactctaagaaacagctgcattttggatggctgacatgggtggagtagaaggtctccctcaggaccctggttgtcattggtgccaactgtccctgactgcaggacaacccccacctctggttacatccttatttattaggagcattaaaaggtcatttttcccggcaagatgaacaggagaaatgtacttgaaataacagctcagtgtctggacgtctctgagtcggcaaagacgacagaagtccttagactggcagctgagtggacacgaagcctctttgccacaccacgttaaaaaaaatccccttgctgctgcagccgccgccctgggggacactgacgaggctgtgcttgctgactcctccaggatgtgctacagccagagagccagaaaaccacagatcccctgggtcctttactctcgtcatgctgtccccttcctccgcctgcttagttttttttttttttttttttttttggggggggtggagtttcgctcttgtcacacagactggagtgcaatggcacaatctcggctcactgcaacctctgcctcctgggttcaagcgattctcctgcctcagcctcccgagtagctgggattacaggcacccaccaccatgcccggctaattttttttttttttttttttttggtgtttttagtagagattgggtttcaccatgttggccaggctggtctcgaactcatgacctcaggtgattcacccacttcagcctcccaaagttttgggattacaggcgtgagcaaccacgcccggcctgcctgcttagtttctggccgtcacttagctttgcaaggctgggagcagcactccaggaggcagaggaagggaacacatgttcagactggggaataccatactaagtgtacagacatacatttggacactgtcctgaaagacatcatacaaacatggaagctcttgaacaaaggtcctcccttgccccaacccccaggcagccctcacgtccttccagtctttgttttgctgcctgatggagaagcagagatttggggcgtggggctggaggaacagccagtgccacttgttcctctgaagcaggtggcctcagacccacctctgcccttccccagctacttgggtcatgtctctacacaggtgtgaggctgagtggcccggggcccacctcactgtgcagggttcgctatcaggtaagagcaccaagctcccctgcttagattcaaaaatcccaaatatgtcaggcaggaagagcatgaccttggacaagtttcctaccttccctgtgcctcagcagtcaaatgggaataatacagggcggtgatgaatttagacaggcccagaacaagcacttgtgtgagctgtcatacctttatccttgctgctcccttaaagacacccccaagggaggagtcactatgcaagggaatgggattcaggggcagaagccctcatcagcattcctgggaaaagggacacagtggctgcttgtctccaggacactcgggaagcacccgccaggagacctgtctgtgagcaccagatatcctggtgcgcctcggtagtctctgcaggaccatgggccaaatcggggagaagacctggtttgctttggccacccctacttactgaggcaaatacaccaaagtccttctggcttccttcgtgcctttccctcagttatgctttgaggatttactctttataggaggaggagaccaaatagatactgatataaatgctcccccaaattttattgagttggatagaaaggatctgtctggccatatccacttgggatgagggagaaggggagcgggatgagctccgatatggattctttaggatttgccagcagtctcagcctggaggaagccagacgttaggatctaagtctggaaggggagatctgctggtgcaaactcggggccacagaaaatggggtccaagctgtggtgtggaccctgtgctgggctgcacctggtatgacctcccctcaggacgccttcctaaacaaaggtgagcaggtgcatgtcccccagggtgctgggcacaagcgtctccagcacaaaagtctcacacgaagaacagatctgttacagctccacggtctaagcctgagggagggcggagggggaggagctgcagatgtgattccagtgaaagagaaggtgggggaaaggggctggctgggttctcccccagctcctcctaatgaaaagaaagaaaaggaggccagggatgccccaaagccaaataagctcatggatcaactcatccttgctgaggccggggaaggctggagagtgaagctgccatgcaaatggtctgagccacatgcagagacgaggagcggaggggaggagcgggcagctggcctggctagctagcggggtggaggggcgaggccggggccagcttaccctgaaaatccccctcacacgtatccaaaactgcgccactcatgtcacacagctgcaagaacacaatgataggattcggagaaaggaatcaacacgacaaaacatgaacgtcacaaaaaaaaaaaaaaaaagctatgccaatatcacagtcccagacgggccacatcaaaccatgatggattctacactggctcagagacctgaacgtatgggacaaaacaacagtctgctgccaaaaggacattaaaatagggtccgcacagggcgagggacattatgaatcctgaaggtcaggagttcttaaacctgcaagatggaacatgagccactccgcttcttagagccctgggggtgctgtcctcccaggccttctgttgcccacttttgttccccaatttctcctctccttctgctcttttctgcttctccattgatatcttctgctcattctttttttttttttttttttttttttttttgagatggagtctcgctctgttgccaggctggaatgcagtggcacaatctcggctccacctcccaggttcaagcaattctcctacctcagcctcccaagtagctgggactagtggcacgtgccaccatgcccaactaattctcctcggcctcccaaagtgctgggattacaggcgtgagccaccgtgcctggccatcttctgctcattctattgcttatgtattgacactaccttgtgtcccttccctggggtggctggaagagtcaccagatgtgacacactgggaggagcagccctggagacctggctcgggtgaccttcagctcctccgcagctgtgaccttccccgagggcagcaagcctgtgccctcctatcatgggctccttcaggagacacctcagcaccaagacccaccaagatgggcgtggtgctactgcattttccagggagaaatttgcctaatttttaataagcctcggggtagatgacagcagctgtaccttcaacattaatcacatccaaaaataaagaagccgaatcaccagatggctcttccccgtaatatttaaatctgacccagtacaaacacttgcaaattggactagccttttcaaaggcagcacggagctgaaccccacagggtcactgcttccgtctaatcacggaagaaataaatcactcttttggagaaggacgtggagggaaaagtgcattatcacaaaaagtcccagtgcatcctaggacagcactgttctttgaaatgggtgagtgggtgtgtgtgtatgtggtgtgtgtgttccaacccaagctgcctcaccttctgctacttgggacaacactaggtacacatatgctccagctcaccgccatgctactgcactttactaagtgggttggctctagcccaagacacagctcaaccctgtgcctgtctccctgaacaaggaaaatgctcaaatgactttagcagccaccacaaataggcccctgactttataatcttatgtggttgaagtgtctggggagatgttccaaaaacatcccgttccttccagccaatgaatggttttggctaaacgtggtgtgtgtttgcgattttgtgcttacagatttttctgggggaagagagctccgtctttgtttctaaatttaagcccaaactaaattaagtcgttgtgggtttgtccaattagctcctcagggaattggccagggaggggagtctggtggaggagaatggagacatgcatgttttctgaaattcacccctctctaaatatctatctggaagtatatttttctagcaaggcttattttagtaatagtaaaaaacatcttgggttcttagcccctgttctccagataagcatttatacctgtcagttgcttgggctctatccaggaaatacctgagttttgatgctgttttgtgatcataaccagcttccagcctctcctgaggccccactccaaatgactcagtgtcttcaacccccgataataagagcaaaaacagaaccccaggctggtgggcttagaccgagagagatcccataagaagcccctgtgtgggacacatggattccagggttgctttccattggtgggcttctaaggagatcttatgagctacccctggtgccagcccagtcatcccaaagcacgcaggaatgtgttcactggcagtaacactagcaatccctcccctaggcacatttcactaaagttcataaaaaaaagtgagggagcctgtggcttggttacctgtagacatgctttccccaggggacatgccatctagcatgggggcctccgtggactgtggactagaggccgagaggtttactgtgggaggctgaggaggcggcagagtaggtctctgtcgcggcttaggagtgggccgcgatttgctcaaagtgcttgtaaagacagaaggagaggccaggggaggagctgcagctggggagagctggcccgaggccaaggagtacccctgagggtagctcagtccatagggtgacggggtgctgggcggggtgggggacaggctgactggggacggctggccagcggactggtctgccatagcccccggctggccaaaggggaccttgggtggaatcggtgccagcttctttgaaactgaaagagaaaacacaacacaacaacaaaacacaaagttgttgaatgaagccacttgtggggcctgttcacacacccttcagcgttcaaagctgtccccacctcctgcccctcgccacccacccacacctccctgccctgccccccggcctcttgccacattgacagcagccaatacaatttttaaaaattaaccgagaactgcaagttttcctatcttcccatctgttaactaatttttcctcctcttttctggatttctgccctgatctacacacgcacacccagccaaactagagaacaaatttcccatccacaggagtgggctgccttcccagtggtgagaggcatcgctgctactctctgagcaagagtgagtcagtggggcagggtccagcagaggatgactccagttcaatttgctgtaatggacagaggagccctgacacaggggcaggtcctcgggatagaaaactgacttttggctgaacctgtccagtggcttctggctcccctaacagtgatatgtgagcaaatcctccggccacagaacccctgttccttcattactttatatgctgtgcctcaatcctgcatccctgctgctgaggctttcttctcattcttgtttcttcctagaattgtacccgctggtctaagcatgtatggatcgactgcatttttcgttgtttttctggggtttttttgttgtttttttttcttttggagacggagctttgcttttgtcgcccaggctggagtgcaatggcgcgatcgccgctcaccacaacctccgcctcccaggttcaagcaattctcctgcctcagcctcctgagtagctgggattacaggcgcccaccaccacgcctggctaattttgtgtttttagtagacacagggtttctccatgttggtcaggctggtcttgaactcccaacctcaggtgatccgcccgcctcggcctcccaaagtgctgggattacaggcgtaagccaccacgcccggccaatcaaccgcatttttcaaagtacattattgccctgacctcctttgccttaccttcattatccttttcccaatctccctataggatgacaaatccattatacctttaattgaaaatgaattggtaaagacaataaattcaaacgtccaggagatacttgatgggcaaatatcttgagagagtgatcactaacctgttaggcttaagtgaggactggctgtgtgtgggtctgattccttttttttttttttttttttttaagatggagtctcgctctgtcacccaggctggagtgcagtggcgcgatctcggctctctgcaaactccgcctcccgggttcatgccattctcctgcctcagcctcccaagtagctgggactacaggcgcctgccaccatgcccagctaattttttgtatttttggtagagatggggtttcactgtgttagccaggatggtctcgatctcctgacttcatgatccacctgccttggccttccaaagtgcttggattacaggcgtgagccacggtgcccagccatgtgtgtgggtctgattctagaaggaattatcttgtaagtcctaagggagaggtcagaagctcttccttctccccaccccacccccactccctccaaggaacaaggtctgttaggaggacacctcatgtattctctgggtgtgtcagtctgcagtgtggacagaaggacatgcccttcagaatcctaccaacgtgggctcaaatttctatcctgccacttacccgctgtattccctgggtcaacttattcaaacatcttctatgcaattggaggaaaaagattttctctgcagcagtgtaataattaaatgagatcatacatgtcaagtaccacataatcatgacataataaaaccacttaactttccaatttcacttttcaactctacttcctgagtacaggggaagtgcttccagcagctgctactgcagctcatggcagccacgtggtcatgggtgacagacgcaggggtacccctggatgagaagcaggtggagaccctaggtatcaatgcttgcacatgccttctcacgaaggagctgggggacagaggatgcatcaccatgtctgtgatgacatttaccacttccggtggtgacaggaataggatgtgaaattgtcggcacgctgtcagaagactgaggtgtcaaaaaaaaaaaaattaaaaaaaaagacctgctaagtgtgccatctgtgggcatgatggggagtagagaagaaatgtatacctttcaaaagatgggtctgagctattgaaggtcacttgggaaagggacctgagtcactctaggctacactggctgcctaggtccaatgtgctgcaaaaacgaaaagggtcaacctgtcactggcattaggaggctgggtggctgctacaggagccctggctctcccactggacgagacaatgacttagccatcacccctgtattgtagtgctgtggggaaagttaaaggactctttttttttggagacagagttttgctttgctgcccaagctggaaggcagtggcacgatcttggctcagtgcaacctccacctcccaggttcaagcaattcttgtgcctcagcctcctgagtagctgggattacagacgcccaccaccacgcccagctgatttttttatattttagtagagacgggtttcaccacgttgtccagtctggtctcaaactcctgagctcaggcaatctgcccatctcagcctcccaaagtgctaggattacaggcaggggccactgcgtccggccagttaaaggactctaaaacaaagaggtgcctggccgggtacagtggctcacgcctgtaatcccagcactttgggaggccgaggtgggcagatcacctgaggtcaggagttcgagaccagtctggccaacatggtgaaaccccatctctactgaaaatacaaaaattagccaggtgtggtggtagacgcctttaatttcagctacttgggaggctgaggcaggagaatcgcttgaacccaggaggcggaggttgcagtgagccgagattgtgccattgcactccagcctggggcacaagagcaagacttcgtctcaaaaaaaaaaaaaagacataaccaagaatatggcatctagaccaaggagaaaccattggtgctggagaaatgctctgagatgctgaaatctcacgccggcactttggcccaactcctattcaaccttcacgatgtcgtttccgctgggccacctgtcctaactcctgagtcgagaaagcatgctcccaggtgtccttacagtaccctgagtgtctcccagcacagtgccaacacctttgccttatcattgccttcctctctggaaagcacagagctctgtacatagcaggatttaataaatttgtgtagaatgcaaaaggaatgagtagggatcgaataagatccacgggcttggtgagggcagacaaagagaatgaaactgccactgcagatcggaactaagggggctggaaaagggcctgtcatgaaggcacatgtggatgagctaaatccgggccctattcgacaaatccaggagttaaaagccgctcctagaagtgcgagtggtctgaaattagaacacacaggatgatgtattattttagacgagtgaaagactctgcaaagagatgacacaggtaagaacaaaccaaaaaggttcagataagtacgctcagtacagctccccatttatgaaatgtcacatggagcatacctttagcttttggaagtgattatctgaagagataataactggtcagtgtggccattcttgggccattcagagctgagactcaggtactacagaagctatcctgactccctcctgtcaccctgtacgagtgatctaggggtaggcagctgtgccaggctgccctgcggggaaggagactcctgtagatgaccctatacagcttttcaaatgacagaggtagggcccggcaggtctctggaaaacacacatcattgtggacaatgaattttgccctggtggcatcatttggtgtatgggaagcactggcctctatacgcccctaatgagcccacctgtcaaataagtaaactgaggaataatagagaaaggatcccttttaacttccaaagctctaatgtccagatgggaattagtcactaaaccacacagtttctcaatatccaagttcatagaggaaaacgagccttcagggaatgtcacagccacctccggcctgagaccaaggagaagggaagcagggccatacctttccggagggtgtgaggactctggtctgcaggcggctggctggggctggggctggcgcccggctgagctccaggttgagcccctggttgagtccctgcacaggctgtgccctggctggagcctggacttcctttctgtgcagagcctggagaaagttccttgctttttgttgtgctgaaacgaaagcacatgagacaaaagaaaagccctgaactcagtgagcggcagcaccagccttgccgatggccaccctgtgtgtccttctgggccccgtgcaagtctgtcccagctctggtctgtcttggccccttcctaaaaccttcgcaggtgccccttggggtgactgcccttcctggagctctgatggcctgggttctgcccccatctctgtggcacttggcactcactgccaatgcccttttcatgcctctgccctcctctcttcaaggagaccgtgagcaatgtgagggcaggggcctgagcacctctaccgtatcctgccatcaacccaggaattctagaacattctcaaactggaacaccaaagtgcttttcctactgtagccaagaggacttctcagggccactgtgcccaacgagtgctgatgacacggactcctgctgccaagcttgtggcccagctctccagctgtttgccctgagcctccagccaccccccaggcaggagggattctaggactcatcctcaaactcaatacccattccagcagaggctagggtggacagaaatccaggccacgcccttaaatgtgggccagtttgagtcccagtcccaggcttcaagagaggtgaaggtcgatggcagtgagggctctggcctctgacctctggaattgacaatgaggcaccctaggtcaccaggtttcctaaagaggattcatcgttactgcaaggctgttcctcagccttcttctgaggatgaagcacgtattagaagacacctcactctacaccacaaaccagggatttgtcatcctgatacgctgatggtagatattactaattgatctccacacttcccccacagtgttctcaatcctttccaagaaaattctccaggtggcctttagtgaatcaggggagatgccccacagttgggagccatctgtcatccgtgctagaacctacctggattctgatgcccacaggtggggcatgaagagtctgggaacccaaatcctctgcaatggctgtttctatcccacaagagcaggcacaacctgggccgggcacggtggctcatgcctgtaatccagcactttgggaggccgaggcaggcaggtcacctgaggtcaggagtttgagaccagcctggccaacatggcgaaaccctgtctccactaaaaatgcaaaaattagctgggcgtggtgacatgtgcctgtaatcccagccactcgggaggctgaggcaggaggatggcttgaacccgggagatggagattgcagtgagctgagatcgtgccactgcactccagcctgggcaacagagggagaccctgtcaaaaaaaaaaagaaaaaagaaaaaagaaaagaaaaaaaaaaggcaggcacagcctatttctttcctaaactgatctagaaactccaggtgttaatttggagaaaattccaataggaatagagcactctcgtccactgaggtgagaaagactgggagcagggagctgggccggggaagcccatagcgtcaaagcacaggtcattttcctcatgcaaagaaataaaaggaagatcacattcaatgtggaggcacattctctcccacttgggatgagtcttacacactatacctagttccccaaggggcaaaaaccattttattcagaggaaccaaaagagcagtaattcctttctctattctgttcatgaaaaacagaaacagaaaacccttgcctcactcaggctggacaaggacctcaggctgcaggttaccaggtacccgggcatcaatgccaaatatctacctacccttccatctatctctgccactatcaagaggaaggccagtcaaccaatcaaaaacatctcataatcagcaaactaaaaaattgcttcttgtgggtgggtagactcttcttccttcctttggacacacatctatccaaggaatctaggaatgagctcttccttctgttccctgccaccaaacacactttttttttttttttttttttttttttgagatggagtcttgctctgttgcccagctggagtatagtgccatgatctcagctcactgtcatctctgcctcccaggttcaagcgattctccttcctcagcctcccaagtagctaggattaaaggcatgtgccaccacacccagctaatttttgtatttatagtacagacagggtttcaccatgttggccaggatggcctcgatctcctgacctcaggatccacccccctcggccacccaaagtgctgggattgcaggcgtgagctaccacgcccggcccggacacacttcctccagcacagaaacaag

SEQ ID NO: 22657 - DNA, 83656 bp, Homo Sapiens
actccatcttgcttctagtctcacaggctgactgtcttctctcagtcctgagcataggccaaactaaccatgggaggaatttagtttatggcttaacttcaaagcaaggatgataatagttcctccctaaaactgatcccctttttttgtaagactaataaaaggtcacaagattaggattataagaggggcctgaattctgctaaaacgtaggcatagtttctttttttttttttttattatactttaagttttagggtacatgtgcacaatgtgcaggttagttacatatgtatacatgtgccatgctggtgcgctgcacccactaactcgtcatctagcattaggtgtatctcccgatgctacgtaggtatagtttctatatcccttactgcttgctcaggagtcatgtggccagaggtcacaagatttgtgacttccccaattgtttctataaataatatcattattgggtttttgagaggtgtttcagactgaccctacctggacttgtgactcatgtctccactggccctgtagtcccctacccaggggcaaactcagtacatgaggactgttttccacacctctatgattgcatcaccaacctatcagcagcacacattccctagtcccctgctcaccaagctgtccttgagaaaccctaacctttcagcccttggggagactgatttgattgatagctccagttcttctgtgtggctggcttcgtgttaaactctttctttactgcaataccacagttttagtggactggttttgtctgtgcagtggtcatgaagaacctttgggcgattatgatcttcaccataaagaatacatttgatatcatttaaaaattaccttccagctgggcacagtggctcacgcctgtaatcccagcactttgggagggcgaggtgggcagatcatgaggtcaggagttcgagaccagcctggccaatatggtgaaaccttgtctctactaaaaatacaaaattagctgggcatggtggcgtgcgcctgcaatcccagctacttgggaggctgaggcagaagaatcaattgaacccgggaggtagaggttgcagtgagctgggatcacgccactgcacttcagcataggtgacagagtgagactctgtctcaaaaaaaaaaaaaataccttccaacttgataggtactgtatagctcattgtttcaaggctttttgctttagcatacatcaagatttatttaaaaactatagtaattaatatagtgtgacatttatacagggctggacaaatagatggaacagaatagagtccagaagcacaacctatatgtaaggtcatataattcatgagaataagacatcacaaaaaggcggagaatgaacagccttattgactgtgctgagataactgactccatgtgggaaaaaaaagaaagaaatttgagcctatctcataccatacataaaaatccattgcagatagatagcagatcactactaataatagaaaaactgttaagcttttagtagataatatttccatgatctcttttatttgtatttctgtgtttactatttttttttattagatatagtctcactctgtcacccagattggagtggactggtgaaatcgtagctcactgaagccttgaattcctgggctcaagtgctcctcccacctcagccttccaagtagctgggactacaggtgcatgccacaatgccttattagtttttttaaaaaacttttgtagagacagggtctcgctttgttgcccaggctggtctcaaactcctgggctaaagtgattctcccatctcagcttcctaaaatgctgggattataggcatgagccaccatatcttgccctttgtttactatttagactgaacttttaaaatgtttattagccatttgttctttcataaattgattattcatgatcctcacttattttacagctatctctatttttcactgatttataaaatatctttatacattagggattttcatcttttgtctcttatttatgtttcaaatataatcccagtgtgttattacatttttaaactttttttaacttttatgttcaggggtacatgtgcaggtttgttaggtaggtaaactgtgtgtcacggggatttgctgtacagattatttcatcatctaggtaataagcaaagtacctgattttttactgatcctctgcctccttccatgaacattttttaatactaaatcagttctactaatcatttactacataaatcagttctactaatcatttagtatataatttctgttttgagattttattctaaagacctaattaaggtttaaaattttcctccataaaatattgttttaacctagagctatgtagggtttaacagataatgaaattagagatacatggcttcttaaaatgtttttattatttcttctatttatatcttttcttatctggtaacaaagggctgtccaaggggcaaagaggatggtacagaattacctcactttagtgaagtaagatgctccccatggaatcagggcggctctcctggccaatgagccctgcacacaattccagtgaaaagaggtccctgaagctgctctgccgtgggtgtagttgtgccatgagaagtaacgactagaagctcagacctccactagcagcagtcttgccttccttctttgtcagtgtagccacctcccttatctctatgttctagacctgctgtctcaaaaattggtttttgattagtatacagatgcttctccgggcactacctcacatttcaagttatgcttgacatttttagctaatgcccttttctgccttttttttaggtggtttaaggagacgaaattatgtgttgaatgaatatatatctagcatgtataaaattttaaatgttataaatttataaaattttatacattctagatacatatcactggaggatgagccattttttctgttgtgttgcttttctttgctttatttttattcgtattaatttcttatttattattttatttaagaaattacattttcatctccaaaacagaagatcattgatccatcttttctgttagtttgtatatagaagctttcactctgagtggggaacagtagttgggctgaagaaaaatcttggagcaaacagcagaatggtgtaccataaatagcatatttgcctcttgttcctttcctgcaggcttttcttctttcattatgagaagcataatttttctatagtctgttccacttcatttccctcccagagactattttatgcgctcaggaataaaagaagatgctggagagggtgtccatggttttacactttccagtggcaaataccaccacttcctcagctctgtccctccagtccagggactggcaattttttttcctgtaaaagaccagataataaatcttttagaatttgtggggagtacagtctctgtctcagctactgacatctgctgttgtcatggacagtagtcaaggcatggtgtaaactaatgagcatgttccaatacatctttatttacaaaacccataaaagctgtagatcctgctctagtctcagtgctgcaggagagggtaactggcaagcatggtttgtaaacccttcaatttttgtgacttacttttgtgtaagaaaggcatgccaaccagtttgaacctcaccagtttatttagtttggatattagttattgctgttaggtgaggcagctgtgattggtgtcatctacaccttttttctcttccttattaagtcaggtcaccgtcattcaagtctgtgggtcgtttctgtggtggtggtaactgcagtgccattttgtctgagaggtgaactggagagcagtcatgaagtaggtcaaaggcctcgcctgggaagccattgattgcttcagcccacagacagaatgttcattatcacagattgaggttgtcagatttcaaatacctcagaaataagtctgttctcctgatgttttttggaaaagcaccagtcatttcctaacatactgtgatagctagttccattcccttttttaagtgctgtacattagtactgtataattcccatttcatttttcagaaaagaaatacagtacactgctgctgcttcatttgaccttttgtatccataggtcaaagcacattataagaatgcctggattctttcataatttagattattgtcactcttaacctttttaatatacacctagttgggaaggggcatacatattacctaagcatgccaagttgttgttttttaaaaaaaatcattttatagtgtaagaattagattcaaaatcaatgtcacattaattacacttaaatcttttaatctcttatttatggatcataatggctgctcaataatgtttggaggtgaggagtgggtcaaataggtttgagaaaatgctagaaaatataagattaagaaggtaaattttttaaaaatctgatctccatgatccttttaaagttctttcttcccctaagtgtttcagagagcaaattagtgaatagcctctacacaccttctattccttccttccctcccttcctcctttccttttgctttccaaaaatccaattttaatggctcacagtagtaatagaataaaataaatattaactttattctcatttcagagaattgatattaaaaggtactagactgacactaggaatcccattctagcttcatgctttgaaatcttgcttatgtccactatgttagggtctttcatttgcctagacttgtcatcgagaaagttcagagaaacatcagaaatactgaagggtctattctcttggagaattaggtgtgtacagagcatgtttattaactggacacctggttcagggtcactacacccaagcctgagctgggattccagcaggtctagccaattgagctcacctagagggtatctgcacgatattctgaggtatctcctggaagaaaactcatcctgagggtagacagagccaggactcttaagtgatagggaaggcatgtctctgagtaaaaagaaatatctataattcaaagtatttctaacccaatcacatagattcatatctggctgtagggactggaaactattaagatataaaaagtataaaaacttaaaagtataaaaggtgtaaaaaactcaaagacttacaattttctaaggcaagggggtgccatagatgagaataagaaaaggctgaaaggggtatttcctgccacctccccacagatctttttgtccttttagagctgtgctgagtaacaggtcattgttctcaatgggagtaacagggaattggcagaggccatggtgctcatcagaacgagcaatagcccagagctgctacagtggcacacactagatatgatggggttgtaggggaagcacctgtgggggcctggaagcatgtgcagtgttcagcctctcttctggtacttctatcctgggacccagcatttgtgtcctgcagatgtgccactggtggctagcagaagctgagtccttggaaggaaccctagtagccagaagaaggagaagctgaaaggacttaattctaagcagatgtgaggtatctccctgggtgacggtaaggccagacgtagtatgagcttacagcctgcatgagccactgtcttagtctgttttctgttgtttacaatggaatacctgaaactgggtaatttatgaaggaaaggaatttactcctatagttatggaggctgggaagtacaaggtggagggggcacatctgttgagagacttcttgctggtagggactctttgcagaacaccaaggtggcacaaggtatcacttggcgaggggacttagcatgtcaatatactagttcaagtctcttttcctctacttataaagccatcagtcccactcccatgataacccactaattttttttattttttttattttttgagatggagtctcactctgttgcccaagctggagtgcagtgatgcgatcttggctcactacaacctctgcctcccaggttcaagcaattctcctgcctcagcctcccgagtagctgggattacaggcacctgccactatgtccggctaatttttctatttttagtagagacgggggtttcaccgtcttggtcaggctggtctcgaactcctgagctcaggtgacccaccagcctcagcctcccaaagtgctgggattacaggcatgagccaccgtgcccagcagataacccactaattttttaatccatgaatccatgagtggattaatcaattcataaggtcagaaccctcaggatccaatcacttttaaagtccccacctctgaataatcccacattgaggattcattcaaaccatagcagtcagttagggcaagtgcattaaaacatgaatttttatcattaatgtaatttgatccagggagtcctgtgaaaccatgctttgtacttaggatgtgaaacctagaaataatcagggttgacaaagagcatagatgttgtctatgccaacctccatcccaatgcaggaattctttctctagaatctttggaagatctgagcctaaatatgctaataaagagaaagtcacaatctttaaaggtctattacactgattgggataggtctatttcttcagaaattttagtacctgctcaaatacccaaatatcagaaatgctaatcacatactgtagcccagcagtccccaatatttttggcagcaggggctggtttcatggaagacaatttttccgtggatggcaggggaagaggaggggatagttggggatgaaactgttccacctcaaatcatcaggcattagttagattaccgtaaggaataggcaacctagatctctcacatgcacagttcacaatagggttcacactcctatgagactctaatgctatagctgatctgacaggaggaggagctcagacagtaatgcggtaatgttcactcacctgccgctcacctcctgctgtgcagccccagtccgtggtctgggggttggggacccctgctgtagcctataattaactagtaatgtaaaatgggacctacaagagagaaaatgtgacttcagacatatttattttcatatgtttatctgcacaaaacatatacgttaatatacgtatgtttatacacaagcaagtaggatcttataacataatttaagaggagtgctatttgtccactaacagaagcagtattcactgagatattattagctgttgtaacagataaacctctgaatcccagtgttttaagaataaaaagtttatttcttgctaactggaagaataagagttcaaatttagttttcttccaagcagtggatcagagacctaacttcctttcattgtgtggctctgccatgtttgacagtggcttgtaaggtcactgtgctcatgtgcattaagccagtgaaaagggaagaaataggtgagcaattgtgggaggttttcatggcttaagtctggaagggctgtacattgcttccatcatctgcattccattggctagaactcattcacgtgaccacatggagctgcaagggtgcctgggaaatgtagtccagctgtgtggcccagaagaagactggttgagaggtgggctagcttctcacacaagtatccttgtttggctttaataacatctccccacaaaacactgaagtataagtcagtcttgtgtagttttaactaaagccttaaacattgtatcttcatggattatgagagaagaaaaattgctcagagcatcctgagctatgtgaggtgcataaaatttatcaggccccaaaagactcgagtatagggcttctgtcaaactccaccacacacacacccatgcctacggggaattgtttaaagttgtttggttcctaactagttgcctcacccattatcttcatgttcctggaatttgtgatacaaagaacagtatatagccaatcaataatatgttattttaatgtaaatttttgataaacaaaatttttaaatgtttcctttaaaaatttacttgtggctgggtggcggtggctcacgcctataatcccagcactttgggaggctgaggtggtcggatcacctgaggtcgggagttcaagatcagcctgaccaacatggagaagcctgaccaacatggagaaaccctgtctctactaaaaatacaaacgtagccaggcgtggtggcacatgcctgtaatcccagctactcggaaggataaggcaggagaattgcttgaacccaggaggtggaggttgtggtgagctgagatcgtgtcattgcactccagcctgggcaacaagagtgaaactccatctcaaaaaaaaaaaaaaaaaaaatgtacttgtaactgctgctaatcagagtgtatattcatggcaccttgaatctatgctcctgggttgcagtcctcaaacttggcccaagtaaactctctgcttttgttaattttgcctcagcatcttccttttaggtcaacaattacatacttggaaataatgataggtggcaggccaggccaagctcattccacccagcttcttagcacagcccacttgatgagggtcagattcagagtttgtggaggctgaagcttatgtaatttggtggaatctgcttaagaaaaacaatacaaaattagctattaaagtaaatatttagaatgagaaaaaataacatgatatatcttaaaaggtaacaagtatcacaaacagtatacaatctagaaatacaacataatatttttaaattgttacttttctaacacatctctgcaatacttttgtaaaccaaaaataaaattctaagcccccccaaccatctgaatggaccccctcctcttggccaagggcaatctaaagttaacctgaaaaaccagtttaggctatgatgggaatcaagagacagacattcctcattatttcctcctccctgttgaaattcaggcccagctgacctgcattaacattaaaacagatcttaagactaacaaaggagactccatgtagcaataagataacaaattccagcctgactctagtatagcatcacatgacagatggcaggccctgaaagaaattaatgtattttaccccaaattatgtttctttaccatctcttaaaatagtcctgcaatgctgtctcttgtggggaaaatctacattctgaagagaaaccccttccttttctagacctttttcctgatccaggagagaatcaactctgataagaaatattacaacctattctctctgaagcctgctacctgaaggcttcctgtgcataatgggaatcttggtctctacaaccccttatcctaacgcagacattcccttctactgattctatctgcataataggaaccctggtctccacaaccccttaccttttttttttttttttttgagacagagtcttgctcatctacccaggccggagtgcaatggcgtgatctcggctcactgcaaccaccatctcccgggttcaagcgattctcccgtctcagtcacccaagtagctgggattacaggcacctgccatcatacctggctaatttttatattttagtagagacggggtttcaccatgttggccaggctggctggtcttgaactcctgacctcaggtgatccatccgcctcaacctcccaaagtgctaggattacaggcatgagccactgctcccggctgaccccttatcttaacccagacattcccttctattgattctaagtatttagacaataacttaactctttcaacctattgccaatcagcaaatctttaaatctacctatgacctggaagcctcccaggctttgagttgtgcctttccagactgaaccaatgtagctcttacatgtattgattgatgtctatgtctccctaaaatgtataaaaccaaactgtagcctgatcaccatgggcacatgttctcagggtctcctgagggctgtgtcattaatcactggtcactcatatgtggctcagaataaatctcttcaaatactttatagagtttgactttgttcattgacactttccccttacaatttggcttttactctttttttttctttctttatttctttttttttttttcttgagacagggtcttactctgtcacccaggctggagtacagtggtgcgatcttggctcacactgcaacctccatctcctggactcaagtgatcctggcttttactcttgaattggctcttcacaggactgcaattttacaacattgttttccatagacaatagaaaactcagtctttcctctaacctagtttttcaaaatatttttctttgttactgatagattagaaaagtttcaggtttattgttacctgaaaaaaaccagggctcatttgcctggtgagtaaaaaatgactctgccagagaacacaggttttgagctataggagttttattatttgtctcaagtaaggagaaccctggggggattctccaaagcagtgtccccaaaggggaaagtgacaggagagttttatggggcgatggagaggggagagagtgcatcatcgcatgtaggggcggggtccgagtggcgcagatgcatgagtcatgatgctggcacatatgtcacatgttatggtaatgacgctatagcccctgctggggtggagattttagcatggtaatggggaaagttcacttgggttcatctatatgttgccaggatctgtcagtggctggttccagctgaccaaattccacactgggtttggggaaaaacaggctgcaaggcaggaggctgtaaaacaggctgattgctcaatttgattaaattcccatagtccctggggctcctctgtctgcttacattacgactttgttaaaaaaaagtttagtctaaagctgcctttttatatattttaaaggtttccctgtacctagtgaactgtagcctaactggatgtgtgaacaggctgtaacctactcttgtgcctatcactgagtttcagccaaaggtgggcactgttcaaagtatgttcaaataaggcaaacactgagctgtaaccaatctggctgtttctgtacttctgttttctgtgtgtcccttttctttttttgatccacaaaccttttttgactgggccgtagtgctggagcctccctgaacctattctggtctgggggctgccggatttgcaaatcattctttgttcatttaagctttgttacatttaatgtgtctaagggtttacttttacaaagttgtaagccatattgtcaggtaaatgtgcaagattatcgtcaaatttgttaaaactgctgtcaggtttcttatatgagcactaagatttcagggcaatgcaaatgttttgtgcagcaattagtctttaatattctctgaactgacagcactttttaatatgcattgcattgcctctcctggggttttgtaagtgccttgtgcaagtaagggtcccttaagcttttttccttagtttcatgggaaatctacctctgcaccagatcctacatggaggctcaacctttccccattttctaagaccagccaatgacctggagaggcctggctatttgttagaagaccacctaaattcagcccttttcctgcctgctgagtctctgggctttgcctgcttctgaatctcttgtcactgtgctttgctccactgtgaggctagagagcccagtgagcctgctatagggagctacggagtcctacactcttttctgaatattttgttctgctaatgacttggatataacttcagtacctgtagcagagcacctccacgcaaccctccaggctgatggaattctaatgacaggtctgattgcaagtcctctactcccccagtgtgcccaccctgctagagatggttggtgaggtcctatccagcctcatcactaggtataactgtaagaggaaggcaggagtttccttaggagaataataggtgacttattcatcttttaggattcagcttgagttagccagaaaagactacttggatgggagagtttcaaatgcctttctaaatagcaatgaaaatattggaggaattgggaaaatgctgttctaaacacataaatggctcgagtccaactctcatgacattctccaaagtagagaaagtcatttgggagcaaatgaagaaaataaaagaatgaagaactagatgagaaagtagaaaataattaaaatacttatagataaggaaagagaaattgtatagataaatttaaaggaaagttgataaaataagggacgtatgtaggaggtttgcgtaaggaataatatttgaagactacaactgggccaaatgagtgaatacatggatttaaaaattgtacaacaacatctagtggtgtgtcttgcccatcatttaaggtagctattttcaaattgtcaaaacaatcaatatgataattcagttgccaagcataaaaaagaaatttctgtgacttagagaactacagaggctaattacaaattccaagggtatagggaaaatactattattctatgaaaccaattacaagtaaatttgatttttcaaaaataatttggcacatgtataaccactatcatttgcaaaatacagtatgtataagttattaattttgtagtctttcttcactcttctgacatttttggaagacgtcaatgctgtatttccctacagtgatctttgattaaagaatttaatttcaaagaagtaaacattgtttattttattagacactggagatgtgtctctgcttccagggtcatttaacatttattattaaacagatatagaaatcaatgcctgtttcatggagtattaaaagcacagtcttttgctaatgtcaccctttgcctatgggagactattttaatatcacttttagatacagaacaaacttagaagcaaatcgatcctcaaaacaattcagagaaacaaacaaattccactttataaatcattcataggtaggataccacccataataatagaagcttacagaggtctctcctttgtttaaatgcaagagtctatccatatgctgttgtttctctatgcattttactgggagaattggagaggtatcttcagttctctgtactatttcttgggtgttaatgacaaaggaaatgctctctagtgcttccaaaattttggttgtttttaccccattcatggaagattattgaactaaggagtaaaatcttatcaggaatgagaggctaaaggacctatttttttttcctatcaacaaatgcataacacaggtatccctatttagagggctgggaagttgaggtttgtggcaaagcaaacttgaaaaggaaatgaataatttaaaaattgttttgacaaataaaaatgatgatatattaccattaaaccaggtgttcagcaaaggagaaagagtccttatttgtcaaataccaaagccctacacttggctgactcaaatcaaagcatctcatagcaaaagataaccttgttaccctcagcttctgaaggtgaagcaaaaggcagcattaccttgaccgtctgtactgcgctttatctcaaacttactttattccacaaaactggtgtctttggtcccctgcgatttccagtagttaataccctcaatccatcaccctttcatgatgggaccagagagctggtaaattttttcccttgatttctgacctatgtaagcaattgcattgcatccagatcacagcctggaattttggagacattttcattgagatagttctcatctgtacttccattctctagtaactatttctacttggcattgatcttgattggtggtttaaatgtagattaattactgctatggtggtgccaggtgatctcaaagttgagtctcattgtattggaatagcaaacgtcttaagcatttatattctcatgaactgatatttatcaggacactgctatcgtttttgaaagaaaatgaaagggctctgtgcatggtgaggcagggggtgggaaccatctcggagagatgaaaattgagggctgcaatggtgtctgtccaaggtggttagagctaaaatttgaaagggttgaatttgctacagtacactaaggctaaagctccctttctcctcccatcctcatcttcaaacatgaactgtcccatttcccttccacactcctggctgtcgtctttggctggagtccatggcttttcagtgactttcacatataagaacagtcttactattaggtatgaagaagtctgattcaatgtaaatcacaacctctatcttatatttgtgttagcctcccggcctgctcagacctgacctgggaactggtttgtgctttcacttttctccatcacatcctcccccactctgcatcctctcttcctgttacgttggggtggtctcctggtggggcctcctcaaccctgctaacccttttcgtgggaccttttcaaggtgactcaagtctagctctcctcagggctgtctttccacttggccccagggaaaaccatgtatccttgcccaacagatggtgtaagcatgggctgctcactctgtagacctctttctcagcactgtcatcatgggaagctccccagcctcatgccttcagagttctttaggcaagagtttgcctcagtttttaacttcccatgtgtctccaaactccaggggacttcaatcaggatctcccaggaactcgctcatggtgtcccactctgggctcacaggggcagcagtgtccaggtccttcatctaagtatccaaccagctggggagaaagacactgtttattgatccttcttgcgagattggcccacactctgctcctcaggaagccctcacaattggcttgagtaggaagcaccccaggccctccctcctaatctggctgacagttctgcatctcaacgactcgaattcttctttagaatttctagttttctcacctgtaggtgggtcatagggtaggcagaaagctctggttctgctctcactagtaagtcacccagttaacggccagttgctgttatttctaggagagagcaatattcaagacgacaaagaagccagaaggaagaacagaatcatatctgtcccatctctgtggagactcccaggaaccactgggatgactatggatggtgtatcagtctgtgagagctcccatcacaaaatatcacagactggacagctgaagcaaaataaattcatgtcctcacagttccggaggctagaagtctaagacgaaggtgtcagctgggttggtttctgctgaggcgtctctcctcggcccgcacatggtcgtcatctcactgtgtcctcgcgtggtctctcctctgtgtgagtgcatccatgctgttttcttatgtgtccaaatttcctctagataccagtcagactggattagggcacacccttaacaaattttcttttctctcttttttctttttatttttaatttgagacagtctcactctgtcgcccatgccggagggcaatggtgtgatcttggctcactgcaacttccacctcctgggttcaagtgattctcctgcctcagcctcgcgagtagctgggattacaggctcaagccaccatgcccagctaatatatatacatatacatataatatttttagtagagacagcatttcatcatgttggccaggctggtctcaaactcctgacctcaagtgagtgatccgcccgcctcggcctcccaaagtgcagggattatagggattataggtgtgagccactgtgtctagccaaaaattcttcattttaactcaattacatctatgaagactttatctctaaatacagtcatactctgaggtgctggggcttacagcttcaactatggattttgaggggacacagtttagctcataacaaaaggagaaggctgaggctgagtttagctggcccatctgggtagatgcagtctggagagcgcttgctgtctcccgtgctcacttacccacagacctgcgtacatcaacagcacaatgtaggcacttggggtaccaggagtcttgcatttccatggctgggggtgaatgagatactgaaattcaggcactggtggtaattcagttcatcacaaatcccagtttggtgagactcacagacatccggggtatgcactaatccagttttccaaagagcaaatcaatcctccggagttacaaagttactgtctctgtctttgcaacatggaatgaaactaacatttctttctttaaacaataagaacaaggaattaacaaatctcctatgctaaaccctttaataccagattagaaacaactagcttacttttatgtctgccctagtcaaatcaggcagaaaattgagcaattacatgtctgtttgcttaaattatgtaaacaattatcttaataggctactttgttttgtttctgtagaccaacacccatctgacttaagtgggatttttatttagctacataacattttgattaagctattttgatgagcaatattggtgcagctcttttgctgtcaagacattttgatcacacttaaaaagagaagaaaaaatcctactaaacttacagcttaaaaaaattaaaatgtttaatgtaaaatagacatcctcacctttagtcccacttcatccctaccttgtttacaatgaagttttccttttttaaagacaggaaattttaatatgtttgaatataaaaacttagaggaaagaatacaaatgaaaaacaaagacctaagaaaataaaattccaaaggaataggacagtttaacagtcatccttttttttttttttttttttttttttttttgaggtcagtctcgctgttgcccagactggagtgcagtggtgtgatctctgctcactgcaacctctgcctcccgggttcaaatgattcttgtgcctcagcctcctgagtagctgggactacaagcatgagccattatgccccgctaatttttgtatttttagtagagatgcggttttgccatgattgaccaggctggtctcgagctccaggcctcaagtaatccgcctgcctcggtctcccaaagtgctggattaccggcatgagctactgcgcctggcctaatgctcattcttatactacccttagtgcaaattttggcagactcatctggctgattttgtggaatattgctggatagtatggttcccttgccccaacacttgaaactaaggaaaatttgggacaagtactcttataagaaatttatattaataagtatgccagaaaataaaacataacgctacccaaatataattcaagtctccttgtttcttttcagctgcaaatgcctctgaattgtctatgtcaatttctctctataaacctgttggtgcctcttttgatgccacctagtctccagatgtgccctgttactctattacggtgtcacctactgacagtcactgtgctcattgtaacttttttctgctttttttctcactggttttcccccaattcagtgggaagtggacttattcctgttttcttgaaggttcacagctttttctcttttcttcatcttttttttttttctttcctgtacgggccagagaaagatttcccatttccactgatttttttcttcttctcaaattagtgcctcaaatgcctccctgaaaactcaagtccaccaatgacaatagtctattttattaattttgtattactttccagtgaagttaatttatataactgtagtataaaatacagatttcatcaagaggcaaaataggagggatggtaaacaaattataatgtcagataaacaactactgccaatggttgtttccatttatttttaagacaccagcatttgattactcagaacacaagcaggcatgcacttggcagttttccctacccagctattgaggtgccttgtaagggtgcagccgtggccagtcaccttggttccttctcttggagcctactactgcttcttctcaaggtggttttgcctgatcaggacgctggcttaatcattaaaatggaaggtatggctgttcactgaagatttatctctatcgaacttgaatgaactggaatgaaatattcattaataaattctagattgtggtctttgtctcctcaacagtttcttgatttttgtgttttaagagacagggtcttgctttgtcacccaggctgaagtgtagtggtgccatcatagctcattgtaatgaactcctgggctcaagtgatcctcctgcctcagcctcccaagtaatttggactacaggcacatgccactgtgtctggttaatttgatttttttttcttactggagaaaaagtgaagagaagctgctctttcctttttggcaagcaagcaacctttccttaaattattgggtcaccatatagatttttaaattatttttacttttgtgtcatcagctgttttttttcttctagttataaatgatatcagcaattaccttagatcttctcaataaactttcatttacatacattctcattattttactgttgctttataatgcctctggcctttgctaaatatgatactttaacaaccagatattttttggttttctattcaacagtgtcttttgcagttcttatattttctgactgattatacttttaggtagtgctatggtttgaacgtgtcccctaaagtttatgtgttggaaacttcatccccaatgcaacagttttgagagatgggacctttgagaggtgtttggatcacggggacaatgccctcatcaatgaattaatagcattatcccagaagtgggttagttatggcagaagcagatttctgataaatggatcagtctgactttccttctctccctgctctctcacactctcttgcccttccaccttctgccttgagatgacacaacatgaaagctctcaccggatgtcagcaccataatcttggacttcctcacctccagaactgtgagaaatcaatttctttataaattactcagtctgtggtattctgttatagcaacacaaaatgggccaagacaggtgacctatatgttgaataacttatttttaaattttttgtcatataaacttccactctgatatatatgcgcaaaatttatgtacattgtcaaaccagaaaagtaaccttttaaaccttaaatgattaatatgcatataatgctcaagtgctatgaagctctctttaaaagttcttctatattctctttctaattttgaatcaagggctgaaaattaattcaataggctagcttttcttaatatatcaagtgagcaagcatgtttacacatgttcattttcttatggccttcaggagttggtaggaaataaaaggtccaaaataaatagattttcgcggacaaattagtagaagtaggttatgtgagatataacaaagtgaaagaacctcttcttaattggaagcttttgggtattgatggactgatcaaaacaggtgaggctggcaagaagcctgtggtttttctagatttgtggcagtgtaggaagctagaatttggctgatgggtatgagagttgctgggaaatgagctaagcttgctgtcaggaattattaagagaaggggtttacaaaacagtaacttggagccggattctcttaaagaagtctgggcccagtaccaaaggaactaaaggaaaaggcggggataagggaatggggccacgacctgagtggaacatggtctctcctcctgtaggatgatctggaaggctgtggagcaacctgaagtccccagataaacatgggaaggagagatgtgtggtaggcactgcagagaaacattgctactttataattttatctggttacaaacatttaaacggtttaaatttacaagtatttaaacagttttctgctgttacgtgtttatgtttacagttaactatttaaaatctaccaaagcaccaattaacaatttattccactctacagtttctttctaatctaattgctctgtccctatgaagtggcaaaactatagagaaatatagtgttttctcacagacatatctatttggagcattcttatggatagcgttgagtgccaaggttaccatgagtgtgcaaacataagttgaccaagaaaagtgattttcatcttgttttcccaaagggatattcaaaatgcatagggtaatatcaagtaatttatatttaattaaaagtaaaaagcatcctgtgtaagaaatttgactaaaataaaattgtaataccattggagctaaaccagtggcaatttatttaagaacatctggaaattttgacagtgctacatttgggttctaagagcaatcattttcactcatatgtggacacattataacaggtaaatggaaatatgagtcaagaaaaataaatgaattttatcttagccatgtacataatttagagagtctgcatcaactagatagtttcctcataactttgtgtctgtagtcaaacacctggagaaaaatagctctttgatactttggagcatcacttttgagtaatgttcagatagctgagtcagaatgttttctcatcaatccaaaagctattgttcactgttgactaattagttctagctcttggctaactggggatcaacatccactccctttatggtttcaaaggaaatagggaacaacatttcttttaattaaacagtatcttagggttaatcacagaactatttcatttgatatgggacaaatcactaaagtaaaacacaacatttattggactagtaaacaagaaaatgttggtattaacatgtattcatgaaaatgtgtttccatgctgccaagagatggacaaagcatattgggaaaaatttattctctattactaacttcagatttatttttcaaactatgagctcatctttcatcacctaaccagctccaccttctaagtgaagtatttgatcatgccagtccagagatgtcactcttctcaactcctgagcattcgttgcctctacacattcgtatttccttatgataatatttactttttcctccctttaaaaaaatatttttttggccaggtacggtggcttacgcctgtaatcccagcactttgggaggctgaggcaggcggatcacgaggtcaggagatcgagaccatcctggctaacgcggtgaaaccccgtctccagtaaaaatacaagaaattagccgggcgtggtggcgggcgcctgtagtctcagctacttgggaggctgagattataggcgtgtgccatcatgtttggctagtttcatgcgcgtccgtgtgaagagaccaccaaacaggctttgtgtgagcaacacggctgtttatttcacctggatgcaggtgggctgagtccgaaaagagagtcagcaaagggagatggattatcattagttcttataggttttgggtcaggcggtgaagttaagagcaatgttttgcgggcaggggtggatctcacaaagtacattctcaagggtggggagaattacaaagaaccttcttaagggtgggggagattacaaagtacattgatcagttagggtggggcaggaacaaatcacaatggcggaatgtcatcagttaaggctatttttacttcttttgtggatcttcagttacttcgggccatctgggtgtatacgtgcaagtcacaggggatgcgatggcttggcttgggctcagaggcctgacattcctgccttcttatattaataagaaaaataaaacaaaatagtgttgaagtgttggggcagcgaaaattttgggggggtggtatggagagagaatgggcgatgtttctcagggctgcttcaagtgggattaggggtggcgtgggaacctagagtgggagagattaagctgaagggaggtcttgtggtaaggggtggtattgtggggatgtaagaagaaacatttgtcatatagaatgattggtgatgggctggatacggttttgtatgaattgagaaactaaatggaataagagaaggagaaaaacaggtataaaaggtctaagaattgggagggcctaggacatctgattagagagtgcctaaggagattcagcatagtcctgccagcaaagattatttatttacttcaagagtttagagtggcagtttggggatagcaccaggagatatcagctgtgatggcttggagaaacagcgtaaaccggcagtgtaaacaagagcagggcatgtatgagtagttgagaacggtgaataggagtatgactagacaaaagatagtacggatgacaagtttttttggggcacagtctaagttggtctggtgtcgaatgagactggggcctaataaaaaggagtgtctatacaggagcttaaatgggctgtgccctgtagcattttgaggacaggtctgacttctgagaagcgaaagtggtaaaagtattgtccagtcctttttaagttggtggctgagcttggtgaggtgtgtttttaaaagaccttttgtccattctaattttcttgaagacagaggaccataagggatataaagatttcactgaatactaagagcctgaaaaactgcttggctaatttgactaataaaggctagtctgttatcagactgtatagaggtgggaaggctaaactgaggaattatgtctgacagaagggaagaaatgactgtggtgtccttctcagaccctgtaggaaaggcctctacttattcagtgaaagtgtctatttagactaagaggtattttagtttcctgactcgggacatgttgagtaaagctaatttgccagtcctgggtcggggcaaatcctcgagcttgatgtgtagggaagagagggggcctgaataatccctgaggagtagtagaatagcagatggaacactgagaagttatttccttgaggatagatttccatgatggaaaggaaatgagaggttctgagaggcggggtagtggtttgtactatagcatagcctgcctttgctggtgtgtggcgattaggcctggtggaactgccatcaataaatcaagtgtgatcggggtgaggaacaggaaagaaggaaatacggggaaatggggtgaatatcaggtggatcagagagatacagtcatgggggtcaggtgtggtatcaggaataatgtgggaggccggattgaagtccgggccaggaacaatggtaattgtgggacttaacaaagagtgagtacagctgaaggagccggggagcagaaagtatatgcgtcaggtgtgagaagaaaatagattttggaagttatgagaaatgtagagaatgagttgagcatagtttgtgatttttagggcctctaacagtattaaagcagcggcagccactgcatgcagacatgagggctaggctaaaacagtaaggtcaagttgtttggacagaaaggctacccggtgtggtcctggctcttgtgtaagaattctgaccgcactaaccatgcctaggaaggaaaggagttgttctttagtaagggattgaggtttgggagattaatcggacacgatcagcagggagagcacgtgtgtttttacgagaattatgccgagataggtaacagatgaggatgaaatttgggcttgactgaagtaatgggggctgtctgtgaagccttgcggcagtacagcccagtcaatttgctgagcctaatgggtgtcagggtcagtctaagtgaaggcaaagagaggctgggatgaagcgtgcaaaggaatagtaaagaaagcatgtttgagatccagaacagaataatgggtagtagagggaggtattgaggataggagagtatatgggtttggcaccacggggtggataggcaaaacaatttggttgataaggtgcagattctgaactaacctgtaagccttgtctcgttttaggagaggtaaaatgggggaatggtaaggagagtttataggttttagaagcccatgctgtagcaggcgagtggtaacaggctttaatccttttaaagcatgctgtgggatgggatattggcgttgagtggggtaaaggtgattagattttaatgggatggtaatgggcatgagatcggttgccagggaaggagtagagatgtcccatacttgtgggttaaggtggggggatatgagaggaagacacgaaggaggctttgggttggggagaagggcggcaatgagatgtggctgtagtccaggaatagtcagggaagcagataatttggttaaaatatctcggcctaataagggaactgggcaggtggggataactaacaaagagtgcataaaagagtgttgtccaagttggcacgagagttggggagttttaagaggtttagaagcctggccgtcaatacccacaacagttatggaagcaagggaaacaggcccttgaaaagaaggtaatgtggagcaggtagcctccgtattgattaagaagggacggacttaacctccactgtgagagttacccgaagcttggcatccgtgatggtctagggggcttccgaggcgattgggcagtgtcagtcttcagccgctaagctgagaagatctgggaaggagtcagagagccttgggccagagttccaggggctctggaagtggctaccaggtgagttgaacagtccgatttttcagtggggtcccgcacagatgggacacggcttaggaggaatcctgggctgtgggcattccttggcctggtggccagatttctggcacttgtagtaagctcctgggggaggaggttctggaggaacccctggccgctgcggttcgggcgtttggaagttcttgtgtgctggagatgtggctggggtttgtctcacagtggaggcaaggaattgcaactttattctattatcgtacaccttgaaggtgaggttaattaagtcctgttgtggggtttgagtgccagattctaatttttggagttttatttaatgttgggagcagattgggtaataaaatgtatattgagaataagacggccttttgaccttttagggtctagggctgtaaagcgtctcagagttgctgccaaacgagccatgaactgggctggatttttatatttgatgaaaaagagcctaaatgctatctgatttgggataaagaaaaaggagcattaaccttgactatgcctttagctctagccatctttttaagagtaaattgctgggcaggtggggaagagctagtcgcggaactaaactgtaagccagaccaggtgtgaggaggggaggtgatagaaggattatagggtggaggagttggggctgaggaagaattgggacttagctcggcctggcgacgagcagcctggggaggaggggaaaggtcagatgggtctgtagaaaaggaagactggaaaaactcagcgacgcttggggttgggactgaggggataggcaggagggaaaggaggatctgggaggaatcgcattgggaacagaggctagggagggagtgaagtgtgaaaaatgcctggacgtaaggcacctcagaccatttgcccatttttctacaaaaattatttaggtcttgtaggatggagaaatcgaaagtgcccttttctggccatttagagccattgtcaagtttgtattggggccaagtggtgttgcagaagaaaataatgcatttaggttttaggtcaggtgtgagttgaagaggttttaagttcttgaggacaggctaagcgagaaggaggaggaatggaggatggaaggttgcccatagtgaaggaggtaaacccagagaaaagagagcgtagagacatggagggaaggggttcggggttgttaccctccagaaaagcgggaaggggggttggggcacggaaataagggattggggcacagagataagagattggggtgtggaaataagggattgggggttcttgccacctagaaaagcgggacttgccgctaagggtgaaggagaaggggttgaggggttcttgcccctgccccagaaaaatcacagaaggggtagagacaaggagagaaggggttggggtactcgccccttcctcagaaaagcgggacttgccgctaagggtgaaggaccaaggcaggcgtccctgcgtggtctgacacctttgaaacgtgggtgaataatcagaggcgtccctgcaatgattaaacaccaagggaaggctgccttcccagcccgtgaccggcgccggagttttgggtccacggataaaacgtgtctcccttgtctctaccagaaaatgaaaggaactgaaattaagagaagggagagattgaagtgcggcgccaagattgaaaggagaaagaggttgagggatagtgagggaagctggagaagacagtaaaaagaggccgcttactggatttgaaattggtgagatgttttttgggctggtcggtctgaggacctgaggtcgtaggtggatctttctcatggagcaaagagcaggaggacagggggattgatctcccaagggaggtcccccgatccgagtcacggcaccaaatttcatgtgcgtccgtgtgaagagaccaccaaacaggctttgtgtgagcaacacggctgtttatttcacctggatgcaggcgggctgagtccgaaaagagagtcagcgaagggagatggattatcattagttcttacaggttttgggtcaggcggtgaagttaagagcaatgttttgcgggcaggggtggatctcacaaagtacattctcaagggtggggagaattacaaagaaacttcttaagggtgggggagattacaaagtacattgatcagttagggtggggcaggaacaaatcacaatggtggaatgtcatccttaaggctatttttacttcttttgtggatcttcagttacttcaggccatctgggtgtatatgtgcaagtcacgggatgcgatggcttggcttgggctcagaggcctgacagctagattttgtatttttagtagagacggggttttaccatgttggccaggttggtcttgaactcctgacctcaagcgatccgtccacctgggcctgccaaagtgctgggattatagatgtgagccacctcgcctggcctactccaatttttttgtattgtagtaaaataaacataaaattactatcttaaccatctgtaagtgtatagatcagtggcattcagcacattaacactgtcgtggaaccatcaccaccatccatctccataactcttttcatcttgcaaaactgaaccgcccaatcacacttagtttttatgaggtctaaacaatttcttgttactcttatcactccgacattgtaagccctgtgtatggggcacccatgtattagttataacatacacatagggtatctactattaggcattgctctaagtgctttgcaaatgttaactggcataattatctttgtatgttctgcaggatctagccagtgctttgcacgtgagaggtaaaatatttgaggaatgaacttcggtaccacctaaacatttcccattgactctggctgttattctggttggcaagttaggaaaggagcaggttaccttggggaaaacgactttcggggcgtaatctgatattaggtcgtaagtttaaagaagtcctttattttagccacatttaggccaagttgctaataagggaagctaacagggaagttattcctaaatgatagagaatataggaagtgactcaaggcagttaaggtcttggctttctagtagcaccgcgttcaactccaggaagactcaggccaccggagacccagggttgggacagcctgggatctgtcagcacggtagcgggcgggggcggggcttcgggccggggcggggccgggctgggcgggctgggccggcctgggcggggcgcgcgactgctccgggcggcgatggcggcggacggggactggcaggatttctatgagttccaggagccggcccggagcctcctggaccaggagaactgtaacgcgagccccgagcctggggcggaggcgggggccgaggcgggtgggggcgccgacggtttcccggccccggcctgcagcttggaggagaagctgagcctgtgcttccgcccctcggatccgggcgccgagcccccgaggacggccgtgcggcccatcacggagcgcagcctcctgcagggggacgagtgagtgcggggccccggccgggagtgggcgggagcctcccctacccctcgcccgaccggcagccctacggccgcagctcctccctgcgccctccttccgcccggacgcgggagtccccgccctctcgcctccttcctccggccgtcggcctcggctcgcccagcaatttaaatcccctgccccccgccgccacgagccctgaaaacctccgcctcggtacctcccgccctccttcctgcaaaccaaaccctcgtttgtattagaagggaatcgcccatgcagagcccatagttagagacggcacctcctggggcacctcctggggcacgtgtgtcgccattcattcactcaagtcgcatttattaagcacctgctgagtgccaggcgctgcttcgcacagggaacaccaaaacgactgggcactgtccctcccacttaggacacaacgtaggatgggagatagatttgtaaacaaatacatgtatggatgtaattagcgctgcaatggttatatgtaccaaatgtgagagacttaaaagcgtgtgtcttggggagagtaaggaacgactttataaagaaatgtgcaaacgagatctgactgatgagtgggagtgtgcctggcaggtggaaaaaagtctaacgttctaggtggagtatattgcctgtgcataagtaccaacgtgcgaggcagcatttagggcacaggaatctgtgggacccacccgggagccctggtagagtgcgagccgccacagagacgaaaacgaagggccctgcttactgatggtaacgatcgcatggtctggtggggagaccaaggcatacacaagtaatattaataattacagaatcacctaagagcaatgataggaggttcacggggttttatcacagctgggagaggtgaggcgcagagttcctgagggcactttttaaaccacctgagccgcaattataatttggttaagtaagagttgtaattaggtaccatggttttacccccaaaagatggtaaataggaatggtgagagtaaagggacttgagcatgttgtgtatatagggggagaggagcctccggagaggctgaaggtaaaatgagtggaataagattgggcgcggtggctcacacctgtgatcccagcactttgagaggctgtggtgggaggatggcttgcttccagcagttcgagaccagactgggcaatatcgtgaaatctggtctttacaaaaaaattaaaaaaaaattagtgaagtccggtggcgcatgcccgtggtcccacggacccagctgcccggaggctgagatggcaggattgcttgagtcctggaggcgaaggttgcagtgagccatcatcgcacaactgcactccagcctgggtgtcagagcgagactttgtctcaaaaatgaggacatgggaaggaatggattttcagagcattgatgggatggagagactcttagaggttagggaagaatttttgagagacaggacaggagtcacgggcacggaaaggagtttccagcctgattgtctcctttcctttgtgaaacaaacagatttatcaggaataaggtaggaagcttgtaaagacagccttgggagtggggcctgtaaacatggctgagcagtggtgcaggcccacctgtgtttggagaccatctccttttattggttcctcagtacagtgttctgcccaggtgtagagaagggaaacacttataattggattttatacacacatgcatgccgtcagtagcaaaagatgacatttttggaagcctgttcccaaagagaagataattttatgtatatgtagatttagatactctgaatcactaaacccaggacacattctggatttaaaaattagtgtagatgtattatgtatttgggtttttcaagagtagctgacttaaatcaattagaggattgtacgtagatcgttaagagtttttgtttcacttagaccgtcaggagagtaggttattttagcctttgcttaaaaatattttgtcgctcttgttaatggtatttagtagatgatatgttggtggtaatgcatgtctcttgacttgggaatgcatatgaaatctctttttttccgggagttgggagctggtcatcactggcattgtcccttttatattgcaaaaacatactcatcattgcttgatagtctgttccagttcccttttcactagatataattgataattgttttactcagatattgctgtgctttaggtcaaggggtccccaacccctggtccacagaccggtactggaactgggccacactacaggaggtgagtggctgagtgagtgagcaaagcctcatctgtatttacagctcctccccattgcttgcattaccacctgagccacctcctgtcagatcagccacggcattagattctcataggagcgtgaaccctattgtgaactgcacaagtgagggttctagtttgcagacaccttatgagaatctaatgcttgatgatctgtcactgtttcccctctcccccagataggaccatctagttgcaggaaaacaagctcagggctcccattgattctacgttatggtgagttgtaaaattatttcatgatatatgacagtgtaataatagaaataaagtacaccgtaaatgtaatgtgcttgaatcaccccaaagccctccccgacccttggcacttcatttaacttctctgagcctcagcttttgttttggttaaatatggattgtatttacgtactgaggttttacttataagagtattctgcaggattcgatgttggcaggactttgacctccttgcaaaagagctgtcctgaccgttgtttacgactggttgtaatacttggtgataaagatgaaggcagttcatatgtcttgactgcagaattctagaaatctttcactagagttgcctctgtgtccttccaactaccattgttttgaccttggtggagactgttagttggctttcattttcttggaagatcaaactcactgacaggcacttctaagtgaaatattccatcccatttgcctttttcttatagccttgtttaagaaggagcaaatcagcagacaaagcaaactcctcaaattctggactgtcttcacctgctagtgtatcctgcttaaattcctgccaggattaggtctatagtcagtgatacggtttggctgtgtccccacccaaatctcaacttgaattgtatctcccagaattcccacgtgttgtgggagggatccagggggaggtaattgaatcatgggggctggtctttcctatgctattctcatgatagtgaataagtcttacaagatctgatgggcttatcaggggtttccgcttttgctccttcctcattttcccttgctgccgccatgtaagaagtgccttttgcctcctgccatgattctgaggcctccccagccatgtggaactgtaagtccaattaaacctcgttttcttcccagtctcgggtatgtctttatcagctgcatgaaaataacctaatatagtaagttagtaccagtagagtggggcgttgctgaaaagatacctgaaaatgtggaaatgactttggaactggggaacaggtagagattggaatagtttgaagggctcagaagacaggaaaatgtgggaaagtttggaacttcctagagacttgttgaatggctttcccaaaatgctgacagcaatatggacaataaaatccaggctgaggtggtctcagatggagatgaggaagttgttgggaactggagcaaagatgacccttgttatgttttggcaaagagaactggtggcattttgcccctgccctagagatttgtggaactttgaacttgagggagatgagttagggtatctggcagaaaaaatttctaagcagtaaagcattcaggaggtaacttgggtgctattaaacgtattcagttttataagggaagcagagcataaaagtttggaaaatttgcagcctgactatgcgatagaaaaaaaaaaaacccattttctggggagaaattcaagctagctgcagaaatttgcgtaagtagcaaggaccctaatgttaatccccacgaccatggggaaaatgtctccaggccatgtcagagaccttcatggcagctcctcccatcacaggcctggaggcccaaaaaggaacaagtggtttcgtgagctgggcctagggtctgcctgctgtatgcggcctagggacttggtgccctgtgtaccagctgctccagctgtggctgaaaggggcgagagtacagctcaggctgtggcttcagagggtgcaagccccaagccttggcagcttccatgtggtgttgagcccacaggtgcacagaagtcaagaattgaggtttgggaacctccttctagattcagaagatgtatggaaatgcctggatgcccaggcaaaagtttgttgcaggggcagggccctcatggagaacctctgctagggcagtgtggaagggaaatgtggggttggagcccccacacagagtccctactggggcactgcctagtggggttgtgagaagagggccgctgtccatgagtttatcaggggtttctgcttttgcatcttcctccttttctcttgctgccaccatgtaagaagtgccttttgtctcccaccatgattctgaggcctcctcagccatgtggaactgtaagtccaattaaacctctttttcgtcccagtcttgggtatgtctttatcagctgcatgaaaatggactatacagtcattcagtgtttgaaaatttcttatccaggaaggtatgagccagaaacccagcaagtttagtagtccacagaaacccagcaaatttagtagtccacagacattgcctctaattctacttcactggcattagaggagatattccaacagagaggagaataggaatggactgtgcatatgggagctttgctgggtagatgagttagttctctagagatttttgggttcacatttttattaaggctaattttattttttattttatttatatatttttagagacagggtcttgctctgtctcccaggctggagtacagtggtgccatcatagctcactacagccttgagctcctgggcttaagcagtcctcctgccttaccctccaaaagtagctgggactgcggcacatgccacaggcctggccaattttttttttttttttttttttgtagagatgtggggctcccttttgttgcccaggctggtcttgaactcctggcttcaagcaatcctcccactttggcttcccaaaatgctgggattacaggcatgagccaccaggcccatccctaacgtgcattttaaagccaaacatcatttgggatgttatgcttttagccgttgcagtcctattgcttctttttagcgcccaatccctatttgttaactatgttatgtctgtattttaaaattttcattcttgggcttaatacctaggtgatgggttgataggtgcagcaaatcaccatggcacatgtttgcctgtgtaacaaacctgcacatcctgcccatgtaccccggaacttaaaaaaaaaattcattcttatgtttatgccccagccaggattgtttttgtatcctagtgtcttacacacttggaaagaaagcctattgcttattcacaattagatacctaataaacattttagggtgtttttttctacatgacatctttgtgtatacctctagctagtaagtagcttgtatgtttagtgtttgattttacgtatcccaattagatttcaagtcacttgtatctctgaactttagtttttcataaaacatcatgttttattgtgctgattattactttggtattgaaacctgaattttggttgtgaaatttgagtttggtgttcttatctggtgtggtttgggactctcttcaatacacctcatttgaattaatgcttagagtaatggagctggaaggagtatctgcttcttgtccaggtctctcatttatagaagggcagaggatacctagggaggttaaggggcctggccaatgactcgttatttgaagaaggatggagatgagagtttgtttccctagtctcagtcaaatgcccttaccatttgaccctcttgcctccctgtaatgctgttgggtaataaggtcaggtaactgcattggatagagcctgggtgtgttttattgtgaactccctctctttctcctttttgttgtatctgccttagtgcttagcttctttattacaaattagatattaaatcctgttctcacattgagagcgaattctttctccagaaaggataacaaaccttttgtttgagagagatttttcactttttgaaatggtctgtttgtttgaagttacagaagaaaaataagtgtaatgcacagttgtatttattattcatgtgaccctggaaacatttcttccccgccctgtgtttcagtttcttcatctgtaaaatgaggttaataatggttcccccttctaatgttgtttttgaagattacatgagttaatacatgtaaattgcttagaacagtgcctagcacctaatataatggaagtgttgcctactgcctattggcagttttctgtacggcttcaccttcccttaggacttcttgtcagcccagttatgtgatttttcacctcgtttttgtttaggagactctactttgttgatgtttttctgagaaacaatgtgctgtctgtttttctctgtttcctttgacatttgctgttcatctttcactgaatatttgtttaagaaagacatacagaatgttaattttcattgattgtagctttcttctttttaaggatttggaatgccctgacagataattatgggaatgtgatgcctgtagactggaagtcatcgcatactaggaccttgcacttgcttactctgaacctctcagaaaaaggggtaagttaggaattgaaccaatagtgtttgaataactgatgctgataatagaactaaaacagtagcatttctgcttaacacagattcactgacctgcctctcatttctgaaattatagcagtttgggtggctctgtcttgatgtcttggctgtagggccatcaccttgctggcacattcctccagttcttctccagcacactcattttttatgtgtagctaaatttccatcacaatttttttttttttgacggagtctcactctgttgcccaggctggagtacagtggcttactacaacctctgcctcctgggttcaagcgattctcccacctcaaactcccgagtagctgggattacaggcatgagccaccagtcccggctaatttttgtattttcagtagagacagggtttcgctgtgttggccaggctggtctcgaactcctgacctcaggtaattcacctcccagagtgctgggattacaggtgtgagccactgcacctggcagtgatgatgcactgaaacactcagtaaaatttggtgcactgaaaccctcagtaaaaatgctagcctttggtttaatatactgagagtattggaatctcaacacggagttaactttttaatgagtgtagtgacctgctagacatgatatgttgtcaggagactgtgtattcctgtgaatactggagaacctttaaaagatattttagttcttggcttttaaaatacggtcttggctaacttacctttcttggggtctcctgtgtacatcctggtattgtaaagtgaagatgtcttgactaagaagtgtgagcacgagtggtgggacaggtagggaggcagaaaagggttgagaattacttgaaatggaaaatcacagtgttaagcttttttaaatctgatgagaaacatatccaaattatctaagtttcagggcctggctgtttaagttccttatcaaataataatgtaaactcatgccagatcttcttgcgtgctctatatttcattaagtgtaattatgtgattattgagaatatagtgcagtaggcctgtcactattttacatagtattgttaatgttttgttaaaaggattttcttacatatgtgatcagaaaagcctactgttattattttctagtaaaatgtagaattctggctgtatttcccagtattcagtagctatggaaatcttcctgactgtgccagtcattaatcccattaagctttgcagactgacctggcatatatttaatgaaaaggaataaaatgagggatcttttgctctgtcttgtttacttaggtcctggctatcattttgggcttagttcaagtttcccttcctctctgaagcttcctattactgttttagcctttgctgatctcatggaattatacaattttagagttggaaggggctttaaaggacacttaatccagcctctcacttggggggaatcctcacctccagcatctctgacagatggtcatttagccatggcctaaattcctgcacggaaggaaaacacactcccctctaggggaactgatggcacttgtggggttgtgaactttgaaaggacttgttatctgtgccacggggtttagccttgctgtctcatgggtgctagtccccagatcactttgtccctgtctctaaaattaccactgccttctcttgttaatcatatgtttctgggtctgtcactagattgtgacttcccggcaggtatttgtatttgtctttatagtaactatactgttcctggcacatagtaagtttgaagatacctttttattgagtgaataagtgaatagccttgtcagtgaaactgtagggccagagatcgtgatagaaaggttttaaaaaaatattttctatgttatttaaaataatgcagaatgcaccaaaaccagtccatgggtactacttttttgacatattaaaaaatagcatagaagagtttccattcatagtttcaaagtcaggcccattagcagcgtgagtgagacagtttaatccaatttcattgactaaatgtacagcgggcccaccatattctctggtttcacatctgctgctttagccaactgtggattaaaaaacttgaaaaaaaaaccccacaataaaataacaacacaacaattgaaaataatgaaaataaaaaaccgaaaaccgatacaatataactttataatataaatattgtatagttatatacaatataactataaaccatttaccttgtattaggtattataagtaatttacatataatttaaagcttatagggggatgtgcacaggttatatgcaaatactaccccactttatataagggacttgagcatctgcagattttgctattggggtgtcctggaacaaatttcccttggataccgagggactgctgtatgtcttgtattgttcttagattgcatcttgggaggttgctcccttttgctgccttttgaatgttattttcaatgccacggtaatgatatggccaaggcagtgattagtaatgacgtagagtttaatgctagtactgacattaaaaagccttacctggctgggcgcggtggctcatgcctgtaatcccagcactttgggaggctgaggtggatggatcacctaaggtcaggagtttgagaccagccttaccaacacggtgaaaccccgtctctactaaaaatacaaaattagccaggcgtggtggcgcatgcctgtaatcccagatacttgggaggctgaggcaggagaattgcttgaacctgggaggcagaggttgcagtgcgccgagatcacgccactgcactccagcctgggtgacagagcgagactctgtctcaaaaaataaaaaaaaaaacagccttacctggaaaaactcagcagatgaaagtgaacacgtgatcattcacctatcatctctctgttgtgacatgactattctggtgatgaatagaattgaaatcagaactctgtttctcagggaggattagcacacactgagtttctgaaaaacaaatgggcaataaggactatgtaagaagtcatcacgtcattctattacatggtatataattaagcattttttttttaatctggcaaagtgactgtatttaccattgccacctggtgctctgttcgtgccgtgactaagctatgtaaaatttaccctttgaaagcattctttagattattttacttataaaaccaagtgtatagaaattttttttgacaaaagaagaatggtttttgcattaaaaagagaaaaacattcaggaaaactagtttgctagattgcagttttaaatttttctttgattgaagattaagatggcacacttctaaatttgatatgtcttttttagagtaaggcaactggtatctttcaaattcttacgtgggcacattttttccatttgatgtatcttcagttttatacagggaaacagtaccaccaggtctgtatctaaccctggcattggaaggagtgatgggaatgcttggcaaagagaaggcacatttaatgctgaagggaggagtgaataatgatacccatgacagccagggctagtttgcaaagcctgaaagatattccagctcttagcatatgccatctctgtggggaatggacttggctctctctctggaaagatgatctgggatcatttctgttgtcatggaaatttattataatagtttactgttattactcatgtgttttggccataaccctattctaaatctggtgccattcttgaatatacttatatgatagaatgcttatcattcatttcagcttaagaacatcttctgtgctgtatttctccttccatgtgcatttctttcaggacagggacttttgtatgcatctttatacctttaagagtagaaataagaaaaagataatgtcttccacagaagcaatttgattgattgatagattgagagagtgtctccctctgttgcccaggctggagtacagtggcgccatcatagcttactgcagcctccaactcctgggcttaagcgatcttcccgctccagcttcctgagtagctagactacacacgagtaccgccatgcctggctaattttaagaaaatatatttctgtagagacgaggtcttcctgtgttgctcagggtggtcttgatgtcctgacctcaggagatcctcccaccttggcctcccaaagtgttgggattacaggtgtgagccatggcaacctgggcttccttaggagtaatttttttttttttttttgagacatggtctggctctgttgtccaggctggagcgcagtggcaccatcttggctcactgcaacctccacctcctgggctcaagtgatcctcccacctcagcctcctgaatagctgggactacaggcatgtgccatcatgcctggctaattttttgtagcaatggggtttcaccatgtttcccaggctgttctcaaactcctgagctcaagcaatccacccgcctcagcctcccaaagtgctgggattacaggcatgagccactgtgcccaccccggattaattttaaaattaaaacttttagtatttataagccagaaggggaaaaataaaacaaaatcatggtcctcaagttgcaacataggaagagtgattgggaagggggtgtgaagtgttcgaagtgtaaggatcgatgaaactaatcggtaggtctactccatggtatcgacatgcctttgtgatcacagtgtgccacattttcatcttctacagtatagaaatcatacatcccctctcatcaagagcctagtctcttgatctttctccttctttaaaaaattaaattattaaaggaacagctgtcatagtttaaaaagtaaattagaactataggacttaaatgaaaaggcagtctctgctccacttgatttctccttaccagaggtggccactttaaatgatatcagctatttcttttagcagataacatgctcatgccattttacttgatattattttctcaattttagactttatttattttctacccagagggtgaaggtttagctctcttctgtcctttgccaatccctgacactataccctcccaaaaacttccctttccccatcttcccaatgtaattacataacatctggggttgaattaatcttcatcatttatatttactatttaaatgtgcacagttgacccattatgatatattatgtttacattttctctttttctacttaggttttttcttaggatactacctgcctttttgtggtttatttagtttataattagctgaccagttcagcctcaatagagccgtagaactcattttagtaaatggaccgcactaggtaatctatctagtccttctgctctccctccccacccacctctccctcttctccatgctctctgcaataaaaattctaatctgaatgttactctctagtgtagctttacagtcatcattctgggattttcactttactatcattacgagaattctctttgtcacttgttattagaccacatatcttttttctttttcattttcctcctggtagctttttgagaaagggcacatgagaggtaaattttttcagaacttgtatgtctgaaaatgtctttatcctagcccctgcctacttgttttagctggatataggattctaggatggaatttctccaaacatggaagttacatcgattattttctagcatctattgttgctattgagaattcacttgacattttgattcctgatccttttaatgtgatttttttttccctccctggaagcttttagattctccttttttccacacagtgttcttagttcatgatgctgtgttgaaggtcatggccaggcctttgctaggctgatggtgcagtaagaaataaaatgagaagggctgtcgtcactgcgcaggagcctggagttgcattatagggttgtaggtggaccgtgcagtgttgatggggcccttctcccagcctaatgttggaaagtcagtgtgccagtgcttcttcccttggcccttctcacgtgcaggtttcttactctgtaggctgtgttcacctgcaaacttcagatgctcatgttatgaagaactagggaagcagtaggaacctacatccattccattgtgtcctcagctttagacatatatcctctgcatggataaataattttgccaggtaaaattttatcatgttagttctacactatgtaatagaatgacatggtggcttcttacgtaatccttgttgcccatttattctttggaaactcagtgtgtgctaatccttcctgaggaatagagttctagtttcagttccattcaacacctgaatagtcatgtcatgacagataggtagatgatagacagatgttcccttgttcattttaatctgctgagttttttcaggcaaagtttttacaatcagtactggtactaaactctaaggctgtttatattggtgtgggcagggttaagggaaacaaacttgatgtggtgcaatcccccagggctggcaacagaaactggtactttagcagtcctgggcatgaagaggtaaggagagggagaaattaccataaactgttgagattggccttgtgggagaagtctgctaatcagagctatggctttggtgaagagccatagtcaacaaatgacagtctgacagggaggaagacagcaaaatacatgcccagccttcaccatcccaccttccagtctgccagtgtctgccaatggggtttaacccacctggaagccagacagcaagggcatcctttgatgtcttccataaaggtcgtcctcctggagcgcagagcagggtggaagatggtgaggaggtgagtggtgaatcaccagcttagttaggtttaaagatgtttttggaacctagggttattattttttgttaagaaggaatgtgcaattggaagggctaagtgtgacgctcatggacagatcccgcctttcagggagttgatcatcttttactcagatattagaagttagtttgcaagtaactaacttttatgttttctttagaatgttaacgtctaccaatcttagtgtgtgttgctaaccctgcccatattctcccttctattcactgtaattccctatgacttgctaatgaataccgtatttttttctgcatatctgtcagcttttatagcagtcttatgcagcatctcagtgatttcatatttattctacattcttctcatttctgttcaagatgaatatatactcattgcctggtacagagtgattgtaataatttctccctcttgagggaaggctcttagtagttgcttttctctgcagcctcttttactcagagctgttaactttgttttgatgaggatgtcctgcttttaatgatgggtatttttgtttttaggtaagtgacagtttgctctttgatacatcagatgatgaagagctgagagaacagctggatatgcactcaatcatcgtctcctgtgttaatgatgaacccctcttcacggcagaccaggtatagaggagatcctcagcaacgcaaggaaaggagactctagagctgaaaaacggcttcttgttatgacagtaaatgatggctgttggtttacttatctttcctatttttttctggttatacaggcttaatagttaactcttccacagagaaaaataagtatttgtgatctgaagcagaagggattatgttagttgggaaggtttccaacagaggccttgttgaagattatagcaaggtaccaaggaaaggttgttgcttaaccccaaaccagaaaaatattgtgaatttccttgtttctttagatttacccaaacacggacaaactgtaaagtatctgtgtagaaattatttagtatcttcaaaaccctgggtaaaaagcattagcatgtattaaagtaacatattgtgtgccccagaaagaagtgagcattattcccgtggaatgcgctaataaggtcaaccctgtattcacttaaaaccagtcgaatcagctttctcattttctgaatactcttcccacctctgttgtattgttgaaatgtgatgccagaacttcttcctgaaataaaatgttccatggctactcggactgtgagttctaccacactctatttttaggctggaaagatgagatcagtaaggagatacattatggcaagcttgggaggagtacattaaaaatttacattaaaattgtgttatttggatcctccttagtcatatttgtggttgaattgttctaggcgtgggaagaatgtggtgcttaaaaaagcaaggtaatagtaggttggaaggttgttttgaggtagagggtaatctagggatagacatgaccttgagaattcattgtcccctcactgacctgcctaataccgtaaactctccctttttttaagagttagaataacagattctgtaggatccttgagtggctcattgtaccttattatatttcctgttttggagactcttcttataattaacataatcccatctccttcagatttgcctttgtttttccttggtggaaatcttacctgttaagcttgttaattcataaagcatggaaatatgctcatgatgtcttactccttcatttaattgtgtttaatttttttttttaactttaggtccttttttctaactattgagtaattttcctgggtttcctttacattttcgctgagttctatatccttctcaacttttagaatctggaaaagggcaagatactgttgtaagatttgagcagcactgcactagacagtagatcattgtttaaagtcaaatgtatttctgaagtttttctgcttttcacagcatttttctctttggacttctactttttgagtaatttaaaaaatccctttttttcgttgaattaatatataaaattatttttctgctgttgaaagaatattttgctgtcatagaggtaatttcccatttatatatactttttttgtgctattgtattttataaattttatgtcagaatttttgatgagatacctttaaattgagcacttgtatgtctatggtaaattttctgttatttgctttcttctaacgattactgtatgatctagctctggtgtgtctgaagtaaattattatgtgtttgtagcacgattacctagactttgcaagacatgttagggccttctgaatcatgatggacgtagtaaatccaattctatttaggtttgtgtttagtatattgtaattttttcttgataaaccatgttcactcctacagtaaaaattttgattatttggagcatccacacctgaacaccattggttaatggagaattcagtgcatttctgctctgggtgccttaggtgagcactgtgttccagatagatcattttccttttgtatatttgattaacagtggtgtgtgtgttttcgaaggttattgaagaaattgaagaaatgatgcaggaatcaccggacccagaagatgatgaaacccctacacagtcagatcggctttcaatgctttcccaggaaattcaaactctcaagaggtctagtaccggcagttatgaagagagtaagggagcctgctgaaatcaatgatttctgtgctttttgtctgtatcaaatgtatagtatgatcatctccagaaagctttgatttcatcctccttctgtttgtgtttgtgtccaaatttacatttttgttgttgttgttgagacgggatttcactttttggcccaagctggaatgaagtggcatgatttcagctcactgcaacctgtgcctcccgggttcaagcaattctgcctcagcctcccaagtagctaggattacaggtgcccgccaccacgcctggctaatttttacatttttagtagagacggggtttcgtcatgttggccaggctggtctcgaactcctgacctcatgatccgcccgccttagcctcccaaagtgctgcagttacaggcgtgagccaccattgcctggccccaaatttcctcttacaaggacagcaatcatattggattagggtctatcctaatgaccttattttaatgtaattacctctttaaagaccatatactgtaacattctgaggtacttggggttaggacttcaacacatgaattttggggaggacacaattgagtctataagaaaccccatcatatttgaagtgtagaatagatattcagtaattatttgtcaaatgcaattcctgtttgtacaaatagtcttgtgtgttactatgaagaattttgggaaccatggatctgtttgacatatgtgagaataatgaactctagaaactctacagttgattttcatgaaaaatgtctgaataaatataaccagcctgtgaacagcctgaggctggttggaaggtgtgtatctaatcattgccatatgactggtcccttccttgaataggcactgatggggtctgtatctgctcaactcgtgttgtcacctagttttatctttatggcatgcccagtccaaagcttagttacctaaagacctttgggttgtatggcttcaacatacagatggtcagacagaccaaattctttcagatggtctgatttggccatgttcctgtaggtatgggctaaacagtgttaacgtcctgactcccaaatacagtcctgatacctgatacagatactaaaatctgtattggtttgctagggctgccagaacaaagtaccacagagtgggtggcttaaacaacaggaatttatattctatagttctggaggccagaagtctgagatgaaggtgttggcaggtttggtttttttcagaggcctctctccttgacatgcagatggctgccttttccctatgtcttcacgtggtcttcctactgtgtcctgatcaccctattttataagaataccagtcatgttgggttagggcctatcctgatgccctcatttaaccttaatttacctctttaaagaccccctctccacattctgaggccctgtgggttgggactttaacagtgtcctatctgtcacaaggggcagaagtgctgagaaaagactgaaatggggtttcagggaatattgttcccttttgtcttcccagtttttttagtccattcttgcactgctataaaatgcctgaaactgggtaatttatacgaaaagaggtttaattggctaatggttccacaggctatacaggaagcctggtagcatctgcttctgggggggcctcagggagcttttactcatggtgggaggcagagctggagcaggtatcttcacatggctggagcaggaggaagggggctggggggagtgccacacacttttaaacaaccaggtctcataagaactctgtcatgagaacagcaccagggggatggtactaaactgttagaaattgccctcatgatccagtgacctcccaccaagccccacctccagcatcacatttctgtatgagatttgggtggggacacagatacaaaccatatcaccaatttcaacaaaattcacagatcaggacttatgtaattaagtgtatatttagtttaattctttcagatcaactcctttcctgttcagagatatcccagaaccctgctgaacggcttgcagttttttgtcagcaggtggattctgtactttccctcgacttttgtgtttgttcttttccgtgtacaagccttcacagtcttgactgaagtattattcatgcaatgatttatttgcacaagtaaaaacttttgttagactttcttgccagcaagctgagaagtgactcacctgcccacttacctctactcagatctgatctccagaagttgtagaattctgagaagatcacccacagtcaatttaattgcttggaatatgatttttgctctttggcattgattacataggtgtttatttagtcattcctagtgactactctgttttgcttccttgaaatgtttttgtcttaatatctgctgtattttgcttttggtcacaggagtgaaaaggctctcagtgtctgagttaaatgaaatcctggaagaaattgagactgccattaaggagtactctgaggagctggtgcagcagttggctttacgagatgaactggagtttgaaaaggaagtgaaaaacagctttatttctgttcttattgaagtgcaaaacaaacagaaagagcacaaagaaacagcaaaaaagaaaaagaaactaaaaaatggcagctctcagaatgggaagaatgagagaagtcatatgcccggcacagtaagtgatgttttgcaggaggcgtcgaacactggaaacaggttctgtggtagtcccagcctttggggctggtggcaggtgcgacaggttgtacatgggcaggagtgttaacacttctaatcagagcccagtgggattttattccagaataccgctgtgctcagcttcttcagaaagtcgttttcttgactagggtgtactggttatctgaataatactgaaatgtttagcaaggatgtaagtggaaggaagagggggcaaaaaaggagaatgtcttgaagaaaagaagctttagcaagtgaacatttttaccacatcaaaatgtgaagagtggttatgtatatttggctagtagtttttttcttatttttgctgaactcttacgagttgtgtgataagaaattagaaggggtttatttagaggtatcagaactctgctcaaggcacaaattgtttgtaaacaggttcctcctgatttttcagtgaggttggaatacaagaaggtaagtgacatcagccatgtggcctagtatttggcagactagactatttctgactggtgaaaacaagtttagaacatctgaaacgctgaccctttgataagatttttttgtgttgaagtcttgtgtattcccaccttgattttgtttgtgtgtgaagaaatgttggttttatttttagagtatgatggttgggtaaagggatctctttttctaaatgggacatctctttttaatttgtgatatcaataacatggtcttacaaatcacaaactagctattatggcttgcaataatatgagttctgtttttgataaagtctgatttacttatctaaagaatacttagcagagaaatagatctcattaagcagatgctgatggaatcctggaaatacagttctaggatggtgggccaccaatgagcagttaacacaaaaagagtcttaccatatagctcatttattatgctgtaattagcctatgaataaatccatttttttcagtgtaatgttcatttgtatctattttgaaaggacatcgtggctgggcacggtggctcgcgcctgtaatcccagcactttgggaggccgaggtgggctgatcacctgaggtcaggagttcgagaccagcctcaacatggagaaaccccgtctctactaaaaatataaaattagccgggtgtggtgctgcatgcctgtaattccagctactctggaggctgaggcaggagaattgcttgaacccaggaggcggagattgcggtgagccaagatcgtgccattgccctccagcctgggcaacaaaagcgaaactccatctcaaaaaaaaaaaaaggacattgcttatgcactgactttgaaaaaagttctcaggtatctattatttttaagaaatggcagtattgattgaataggtgtttatttagttattcctagtgagtactctgaaaaaaacccaaaaccaacccacatttgtttgaatatacaatcctagaaaatttgctttaaaatattagggacactattttgcatttgcatctcatatttttagaactggcaccctttaaattgccctgttatgcaagtgagattaaataaaatgcttagttaaaaagtcatagcatggttggtaatttctgcctatttgcttttagggattacatgtaaatcctccatttattgctgttaacacttggctgagaaaagtaaatttatccctagaggggtttaaaggcttcgttttgtaactcccatgtaaaaagggttagagtaaatctattgtgtaattttacatggcatttatattgagaaatggatttggcaaggcaacagttaggtcttacttcagccttcattggtcttgaaatagattcatagtaacagtaaatatttttcataatatttgaacttttgaagttgcattttgcctgatttacaatttgtgtcaaaaattttaatcagttcagtaatggcacggctaagcttgcagtactagtttcctgtatccttttaaagcctaaaatgcggccgggcgcggtggctcacgcctgtaatcccagcactttgggaggccaaggtgggcggatcacctgacgtcaggagttcaagaccagcctggccaacatggtgaaactccgtttctactaaaaaatacaaaaattagttgggcgtggtggcgcatgcctgtaatcccagctactcgggaggctgaggcatgagaatcgcttgaacccaggaggcggaggttgcagcgagccaagattgctccactgtactccagcccgggcaacagaacgaggctctgtctcaaaaaaaaaaaataaaaagcctaaaatgccagggaaagaccttcctatctgtgacacaagtaggctggaagggtgattctgaaaatagtggtaggttgctcaaaagaaacccaaagtgaaataggcagttggataaacagattccaggagcttgccaaacattttaccaagcattttatatcacatgcagtcttggcaagacctggtctctatgagtttgctattatcagtgatactaattcctaaaaaatggtgacctccttagaattgtcatatgttacctgtttttccaataacataagtcacttttttttttctcctgcctgagatatttttgttttattagcaggacttgaagtttttcgttaagtatagaatagcttccatttttcttcatgtatgtttcactgaagcagtacatcaatttgtagttggcataccacttaatctaaaattgttaccttgttctctttggtccaaagatactctaatgaaatattggagtgggtatagagcagagttaaacttggagacagattttgttttaaatatttgttgtggtgaaaaaaaaaatagagggcatagggatgctatttagagcattggaaaatttcattagaccatgaaaatatgtgaaatgttacagaaagtattatcttataaaagtgaaatatgattttgattggagttttaggtttaaaataaccataatgctgtatgttgggtaagatgaaacaatattcattcattcagcaaggatttgtggagtgctttcctgtggcaggtgttcttcaagatacagtgggcaggatgactcatgatggtaattctaggactttgagaggctgaggtgggaggattccttgagcccaggagtttgaggccagactgggcaatatagtgagaccttgtctttacaaaataaaaattataaaattagccaggtgtggtggcatgcacctgtagtcccaactacttgggagtctgaggcgagaggattgcttgagcccaggaggttgaggctgcagtgggccatggtcacaccactccacttacagcccgaccttgtctcaaacaaaaaacagaaaaaccacagtggtgaatagaatagaatagatgaggcccatcccatgccttcctggagcttatagtctaatgacggagaaaggcaataaacaaggaaaaaatgaatagatgatggaattttagtagtaaataaaggccatgaagaaaaccaaaggctgggtgaggtggtagatggtgatgctgttgggaagctgttttggagagtgtcactacaccactgcttctcctcattgacaagggagcctgcctagtccctttccaattctccgtttgaagaggaggttaaaggagtggacctctttgggaagtgcaactcaagagagtggcaggctttatatttcctctgtccttttttgcagcatctggaggagcagaggatggggggttagagagtggttaaagggcactgtctgtttatcactatggtgacctacatgtatttctttgtgctgaccatgctgttttgggtgacacttctttatattcaatgctcttcttctggaatcaaattccttacctgctgcttctgtccacttgggggattttttttttttctcactcatcctttaaaatcatggccaagcattgtcttcctttcttagaaccttccttgatgactctgtccgatgcagagttgactactctctctttttagaggggttagtgttactcctctttagtatttctattatcactgttgtatcatactgcaattttttgttttcatgcctatctctgttttatgtccctaatgataagaaatttaactttactttctcggtattcgtagatccaaccttaggtacctaataaatttctgctgaatgaatgagtgaacgaaagataaacttgcaaatatatatttctatattggatctttctgccaggtgtcaaacccatggacagtgaatattgtctaagacaatagaatattgactaagagctttgggttaagagctgtgtttgaatcttcgtcctacatacagacggctttgaattttggagagattaaatgaaataatgtatataagattagcaaacatagcaaacaccatgagtaaatgctaattgttatatatgtccaactgcctactagacaattccctttggatatcttgtaggagtctgaaatttatactattaaaccaaagttaccattttcctaaaattgaattattttcttttggttagcaaaactagtttatccactcactgaaactgatagaatttccaagtcaaagaatatagagttttaaatggctttaaatgaccagcttttcaaattattgtgtagaagtgtagcccagtagagcgtaagagtgaccattttcccacacctcccgccaacaggagatattaagagcttttgaatatacactgcacaggcaaacaatgggtttgatctgttgaccatttgtattcttttatgagttgcctattatgtttatatgcctgttatgaggtgttttcatatttatttgtgagggtacacatacttgtgatattgaagtaccacactgtgttgtaatcattggcttaaacctctcttctaacagagtgcaagctctttaaaggctcattcacactgctttcccagcacctcacctaatttcttgttcttcgcacatcacttaatgcatgtttgttgaattgaaacttcagtgtacaggagattgaatcccggaggatttagatttgtagtatttgaattattattgttctattggggatttttattgggggagccaggcttctgttacatcagacattcacaggtcattgaatttcagtagcagttctcatgaatacaagaataggttgaacaacaccaggttatgttgtaatttagtagttgctgttcatctagtgttatctgcagttgtctgggcattatggcctacctgcttagcatcataacttagtaaacttatatgtatgaaaatggaatagttaccctctgagtatctagtaacaaatctttgaattgaatgtcacatgtaaggttgtttatgctaagtcttgttgagaagataggaatcgatagtcttttctgtttgccataatgacattgaactttgaagagagaatttctactgtgttacactccaccatcaaaaatgcataactgcgtcagtcaaccctgaaaaagtttatacggacaacttttgggatattagcaatcagtgactaacggtagtagagaaaagaaaaaactgtaaaaagaatcacattaccctaatttattgcttttcgggggttagggagagaattgctgaaggatgggggagagctagggcttagatgatatacactctttcttgtatatattttctttcacagctacattgctccgtttctgtgactcagctcatgttataatatgattgatagcctttgtttggggcttctgtttaaaacaacatggacctggctttttccccccttctttttaatttggaatttttttaacagcacatttgctcagatgatttaaaccagggattgtcaaggcagactactgtccaagggctaaatcaactcttcacctgttttatgaatacagttttactggaacacagctatgttcattcatttatatatcatctgtagcagctttggggctatatggacagagttgagtggttgccgtagagactgtgtggcttacaaagcctaaaataattaatgcctggctcttgacagaaaaagtttgccaatctctgatttagacttagtaaaattaaaaagtagaacaaaaagttatgaactccagttaagtgagtttgcatagataaaaagagtactgtaatgtttctaaagtttgtatttaaaaggttactttgttttatcttgagattatgttgaattgttccttttcttggggccccttcagcagcagcctgagtgatagtgacaccttggccagccaatctccaagctacgtgtggcagcttcttgtctaacagcagacctctgtgctgtgtgtgtctgaatcccggtggctaggtaaagagagtgagcaggtagaccagtgttctctaaatatggagacaaacaaaaggaataaaaatgttgtattatacacagtgataaaatgtggttttaaaagaaggttagaggagaagtggaaaaggcatgagtttttttcccctttatctttttttttttttttttttttttttttcctgagacggagtctcactcagccgctcatgctggagtgcaggggcgcgatctcggctcactgcaacctccgcatccccggttccagcgattctcctgcctcagcctcccgagtagctgggattacaagtgtggtccaccccgcccggctaacttttgtatttttttttttttcagtagaggtggggtttcaccatgttggccaggcttgtcttgaactcctgatctcaggtgatccacctgccctggactcccaaagtgctgggattacaggagtgagccacagtgcccagcctttttcccctttatctaagcagtggtgcttgagatactaaattctacctgacatacattctttttttttgagacagggtcttgctctattgcccaggctggagtgcagtggtgccatctgggcccactgcagcctctacctcctgggttcaagcggttctcctgcctcagcctcctgagtagctgggatgacggcgcccgccagcacactcggctaattttttttagtagagatggggtttcaccaagttggccaggatggtcttgaactactggcctcaagcgatccgcccacctcggcctcccaaagtgctgggattacaggcgtgagcaaccgtgcccggctctgatacgcattcttgaatgtaaatattgacacattttaacaataatttgttggtgatatttgatagtatcttgctgcattttctttagtgcaaagcatttactaagaattactattagcatgatagaaggtcattgtagggtggagaaaaacttgactatataatggctattattttaataattcaaacctatgaattatgaattactttagatgtggaacaaatttgttttatgaaaaataatattacctagagaaatatatgtcatcatcagttttcgatatgtttttatcatctacactttgttttctgcaatggtttttggtggtaggctggtaatagtgaactttcatgatccatcagttaatgtagtaaaaatcaggagtccattcttgacttctttatgtgttagagaggtcattgttaatataaacaagttcacataaaagctgtaatgtgccaggaaattgtgttcttcttgtatacagtcttgtgccacatagtgatatttcggtcagtcatggactgcgtatagatagatgatggagtcaggattataatgctgtatttttactgtactttttctatgtttatctatatttagatacacaaatacttaccattgtgttactgttgtctacattattcagtacagtaacaggctatataggtttgtagcctaggagcagtagactataccatgtagcctaagtatggagtagactatacaattatgtaggtttgtgtaagtacactctgtcatggtctatacgacaaagttgcctgactcatttcttagaatgtatcctcatttttaagcagcacatgactgtacttagagtatttatgtttcaggaaggaatttctaaaattgccaagatcaattattatattctagttttagtggttttgaaaatatttggcaataattagtttagtttccacattaatattaagttacataaaaaattttaaaaagatcttcaaagataaaaattaaattatttaatgctaattttgaagatctttgtattatattttttctgccataaaaataaactcatataacagttgtttaatattgaagattttcaagtgtgtatctgctttggtataatgtatattttctaatttacttagatctgtttttttaaaaaaatttttggtagaatttgcttttataactgctttataattcacattaaaattatttgaagtattaaaacaagatattacttttacatcttaaataatatcttaactatttgaatatttttactctaaattttttacacttgtttcctcattttgattattttaatttattaaaaattaaacctactgttttataatgtttgaaaatcatattcaagctattgaaagtgtcgtgatttatcaggaacaataattatgttttcattttgctttcatttgaacctcctgagtataaagaatattaatgaagtaagagtagattagagtaagagtcagaaatagatgaaaagcattccttgagtgctttttcaaaccttttttctgtcattgagctttgatattgagattttaaaatgatttcctggccagttagaaatctgtaccagttggtgtcaggtgaggctgagaaacaagtttgatagcgggaatagtgtaaatttcctgagccctttgttgtcttgcttttccctgtcttggatgttgctttctgtgaagctggttgaactggtgaatatgctgtgtgtagaagaagctgatatatttaagataccacagaagaactaacaaactgcagcactgtatctgattcttgttcacttttatgtagcatagtgttctctagctcttttctttttattgttcagaaagaccgaattatttaagtgttaacttgttttctgtttaagcttttttgctgattctgtgcttagtcatagatagtaatgtctctttatgttgttttcagtcctatcagctaggaactataatcggggatttattttttctcagctgcaattttatttatattagaagaacttgaaatgctgtttttgctgttctggagaaaagtagaaaggtgtggttatttctctttgggagttgtgtctaaaatattattctatcctttttatttttaggaattatagccaatacttttttgaatattgatatttgctgagcactttgctaggtacttgcatggattattccatgtaaccttcacaacaactctataaagaaggtattattgttattatttccatttcataaatgagtaaacaaaagcttaacagggaccttagctcacagaaccagcatgcattggaatgaggatgtggagttatttagaggtggatggaaggatccttggcttgaattttcgttttctgagctttgcaaggatgttgtaaatgggccttggggatcttggcccatttcttcgtctttcagattttggtgaatttttataaatctatatcctgtttatacattgttgctactggttttgtctgagaaaagtttccagataaggactgattttgagactttcaatacatacttatgccagggaaggaaacaaccacgaggcagtggtgagtattctcagcgtaaatactggtgttgaagctgtgtattgaataccctcttcctccgtccttgccacattactttggcatttgtcagtagtgagggcaacaataaagtaaatactgtaatgcttaatcatttccctgctcacaaatgggctcctatcaaaaattccatcctgagagggggcattttatagcactattaactccttcctaaagacgtagtgggaaatggatgaatcaattacaaaataacttcagattcagaattttcaccagttcttcactttgaatttgaacacttggattctttatttcaaacttggaaatggtagattaaatggagggaggattgggttttctgatatactgcgttattgcagttatttaaattaaactgtaacaaattgttttttcttttcttttaaaaaattatttacttatttatttagtaacaaatctttaatgtccttcatttcattcagcattcataaccctgagacttagttctgttggcgctttggtatgtctttggtactttaaccttgagaaatgttatcaaagaaatgcttccctcccttccccctcccactctgtctccctcctcccctaccccttctgtctctccctttccttgtcctcctacttataaaatttaagcatagagaaaatcttccctctggcccagttaagcaccataagcacctaataataccgcatctgctctcaaggttgtaaatgtagtgtttctaaatgaggtgacgtttactaaaaagtatatttaacctgcctctgaggttttatctttttaaaattcattttgccttccaaaagggtgtgttattttttggaatttacagggcagctataaaacagaatgcacagtatgctctacacagctcgtttcctgtttcttcctggtctcactgccctggtctctcttttcctttatccttctagttcactgatctcctacttgctactctttgattatcctagctaggggtttgagatttcttttttttttttttgagacagagtctcgctctattgcccaggctggagtgcaatggtgcgatcttggctcactgcaacctccgcctcccgggttcaagtgattctcctgcctgagcctctcgagtagctgggattacaggcacccgccaccacgtctggctaatttttgtacttttagtagagatgaggtttcaccaggttggccaggctggtctcgaactcctgacgtcaggtgatccacccacctcggcctcccaaagtgctgggattacaggcgtgagcctccgtgcctggccggggtttgagatttcttagtcactccattgttttatgttttataaaccacgccaacaagattatttcattaatctcatcttactttcctagactagattcttcagtggacttttccagaactccgttgttcactcttctgaaaaataacttgatgttctgtcctgtcatctttattctgttcatactccacttattttgggctttttttttttctttctctcctgcaagaagtcaagacacctcatgatatggtgaaacgatcataggctctaaggctcttgggttctggtgttaggagtgtcacagcctcagcttatgagacgtttaaaaatgactgctatggcccaggcactatgcaagctgcggggatggaaagatgcctaagacctgtctctcccttcagaatgtagtcatttcctcataagaaaatgaagccactggactctgaatgtatcatctggctgtgcagttctgccattctggagcactcatttatttagtcctatagagagagagagagagtgtgtgtgtgtctatgcgtatgtgtgtgtttttaatttgcttaataatggatctttttgattgaattaatccatagactcgtaggatttacaaataagaagacgtttaaagttaatatgatttaatcatctgttttacaggtgaggtaacaggccttggcagtaaagtgactgccctcctgtcacacaattagtggcaaagctgggaaagaacccagatcttcgatttctaattcagcacttttctgtccaagttgaccgtttaaaaatttcttgattctaagacttttgcctgagctatgattcctggtttcatacagaaatctggaagtatcccactggtattggtaatgatcgctgtagcgttttgcaggttaagtcactgactatcagtcagatgcctcctacatactggtctggtttttgctttttggagcatatgaaagaagtatctgacatttttttttttctgtccttaaggattttgagaacttgagttgaatttatgaaaaattaacctgaccagaattttcatttttctttctttattgtttctctttagatcttgtgcactctacctccccattaaaaatatcttgattacttttttttttttttgagacggagtctcgctctgtcgtccagggtggagtgcagtggcgcgatctcggctcactgcaagctccgcctcccggattcacgccattctcctgcctcagcctcccgagtagctgggactacaggtgcccgccaccgtgcctggcgaattttttgtatttttagtagagatggtgtttcactgtgttagccaggatggtctccatctcctgaacttttcttatactactattaggcaaacattaattgatccacagttgtgtccctggcatgggtgttaaggatgtagaaccaatttcagttttccaggaatgtgctgcccatgggttgcagattgaatgatgaaccatccaatgtgctttagtgcggtgattctcaaccaggccaattttgccccccatgggacatgagtcaatgtctgaaaacatttgttgttgtcacaactgggcagggtggggaaggatgggggtggtactgctggcatcctggtgaacagagaccggaggtgctagtggagatcccaccccactacactgacccccgtgacaagaatgatctgactggaaatgtcagtagtgtcaacgtggagaaacctaggtacagggtgtgataattgctatattcaaaacaactaccacgtttttagtgttttctgagcctggctctgttctgtggtcaaggtggacatatattactattgcccctagctaggtttaggggtctgggaaggctgagttgcacccggaggtcaggtagaaggaggagggaacaggcacagacagcagagggggtggtgtgtgccaccacttggaggggacagttagggacatctggggaaatgcaggctgctcattatggtgaaagctagaaggtgagggggcaagaaactcaagaagaggctatggaaattgcacagtggaagctggaaaatggatggcgtcgtacgacattctgaggcacctggtttttgtttaaagggtttagagaaccaaaaatggattttaggtcaggtagttacatgtttgggtttgtctgttttggaagagaacttcagtggtttcaaggagaactaattggaaggaggcaactggagataagttaattaggaggctgttgcagcgatttcatgtaagaattgagccagggaagtgaaagtagggatggaaatataaatagttgaatttcagagatattggtgaggttgattgtttcggacaccaaagaagggaggagttagggtcaggtcattgattgttgacgagggcaaacatagataaagcacatgtgccccttccccaaagggaggtatgtaaatcttgtcagcagtacctgcttctagcttcaagtccagcaaatgaggggatgtctctcttttccgtcaacctatggtctgaaagttaagccagccattgcaacacattggcacacaacgggggagagaagacagggttgctgcaataacatcttataaaaaggaggagagaatggacatattccatagatgctgtgttccatcccattgaatgagaattgcaagacctcctgcacactagctgtggcgtgaactcccgagttggcccggttggctgcttttggttttgttctctgagaagatctcccttgtccattgtcctttgtggctcatctaggatgggtgtatacgtcatatttcagctcagatgtcatctcctcaggcagcttttctctggcgtccgagtagaaagtaggcatccagtttttaatcgccttgctggagctagggatagggcatgtgttagttatctgcagcattcgcttcatttacgtgttgtgctttttgtgcccccttatgctggaatgtaaggtcaggagggtgggaggggccttggctgatgtgttcactctgaatctctaatacctggaatggtatctggctcaggatgttttttgaaagaaagaggaaatgaatgaacgaggagaataaaatgctgaaggaggaaccggtttttaaatttttttgtttgtgttttggtggggaagaggacattgaattcagttttggatatgagttttagaaatattgatattaaatatagacaggaacataggcttgtcaataggccattaaacatacaataggtacagatgtccaattggccattaaacatgcagagtgaagctcagggaaattacagtaaagatagctaacatgtactgagctttgccatgtgccagtctctgttcttagcactttactgatcttagtaaagtggagctatcaatttatggaagcagaagatgaagctattgattggtaatacccagagggggtgcatgataattaaatagggacagaatccagaggcacagcagcatctgagaggtgagtcaagaaagaggcacaagatcctagggaacactggcatttaagggatgagtgaagaaagtggcccctcttagaagaagcaactagagagcaggagggttggggtgagggaaatctgggagagtgtggtgtctctgaatccaaggaagcggttcagggaggagggattcctggatgtctcagagatctgaaaagtggccgtggtcttccagatcaaataaatgatgttgggaagagctgtttcaggaaaaccttgggaaaggaaagaggttgagggtttgagaatttcgggatgctgtcaggaaggagctagtagagagggagagtttggaaatgcagtggagggagaatattgatgctgcctgacttctggggaggtaggagttgattgcaactgaagcgtttgataggagcacgttctcagacgtagattttagttttttttttttttcttttttttcctgtagaaccttctgatttccttgttctgtaattttccaatggatcaagaggcgattgaactgtacatgctgcacattgcttccctggttcattgccagtgaaagagctggggacagtagggtcttgtcagctgcagccactgactcagcagccatcagcagcaaggacagaggttctgctgcattccttactttaccttctttcactggcatcagctgttagttttgtttttccaggttaccttggcttcccatggggttgcattttcactaatttcccctaagcctaaaattctggtggcacaaaagccatctttcacaagtagtcaggctgtcagtagttgagatggctcagtaatgtctgcaaccacacatttaataaagaaaacctaaattacatctgcatgttacgaaattgaaactgcatcaacttttgttttttctagtgacaggaattggctttctgattgcgaaaacaaagctagtgtttttggaatgtgctttccaaatagaaagtgtgtcttagtttcctgataggtggattctgaaactttttatctagctttagattttatgaatttgtatctagcttaaacatgctcatagataatggagccaggtaatatagactaagtacttaaaaacaagtactcttctctttgtcacatttgaaagaaaatatattttatgaaaataatttaaaaaataaactgacttggttatttgagaatagtttctcataattgttattatatactctgaagcctaagatgttatctcatttgataatctgcttaaaaaatatgaatgaattatgatagcattggaaaaatttacagaaatagttttctgtaggtttttgttttataactagcctcctccatcaaagctaatagttatgctttcagtgaagtgaagagtagtcagcaaagtatcttgactagacatttgattcttgctgaagcaaaactggcttgcaaatctgggaaaggctaggtagggaagttggatggtttaggaggagaggcatatttgtacagtctcctgtaaggtagtaaaatttggaactcagattttcagtaactccatagagttacatgactgatacagaagcacatagctccctcagtgattcagcctgttggcatttcttagctttttgttatcaagacttctttacgctcttaaaatttatcaaggaccccaagaaacttaatattagccatgttacaaattaaaagtgataaaattaaaaatataaattcatgaaaaataccaaaaataaattcattataaagagcatatatttatgaaaaataatattttacaaaatcatgaaaaaatatcattgctgtgcatttttgtcaatctcattaacatctggcttgattaaagacagctagattcacaaatgtgcttctgcattcagtctgtcatttggaatatttcactgtaagtcatgagagaatgagagtaaaaaagacaacttatattttagtagtattaagaaaacatttttgaactcctgaactcctgagaggatttcagggacctcttggcaggagttgggtgggagggggtccctggactacactttgagaaccactggatgaaactatatgtatttcttgatgaccattcccttggtttcctttcttctgccccttggggcctggtaaaatattctttatgttgactcctcaaatgtgtttactgatttaaatttcctctataaaattccaggggaaggaaccatcaagtgagtcaggccttcacttccttttcacgaagcctttccccttaattagtcatgctgtaagaatccatctcactcctttgactcagccgccatagaggtgccaccagacgctttttactatgcttgatgacattgtagactggttacaaatcaagataagttgtttaggaaaaaaatactcccttttcagtacaaagaattctaggaagtcttggaggttgctgggagaaagaaagtagaattgtttcctagaaacggagtggaaaagtctttggagaagtttttgggggcctggctggcacatgggatccactctgctctccaggaagcgtatgccatcttctagttcgcatttctgcaccaaggcagtggcaggtggcccgaagagtgagtgggaagcaataatcagctctccaagtaacagcattttcatttgctaaatgttatgttaatgttctccaaactgatggtagaattatacaaacttaggctgaaaatacgcatactgttcatcttaagttttcagacttctgataaaatgtaggtaaataatatcaaaaagtatcttaaaaattacacagtaaattttgtatagaacaaatatgtgtacaacttacaacatttacattggaacaattagctacatcagaaaaatgcctgcatgaatatagtagcataaaaacagttgcttttgcatttaacttgcaaagaaatggaagcaacagcattttaaaaagagcatgggtttatgtgctttatctggatgagtagtggcattttctaactgcttgcctcttgggcacataagtcatcatggtacattcttactaatagactttgaacttctttctctgtccttttcttctgggccgtatattgccgcctttagcgcttcagcatggaagggatctcaaatgtcattcagaatggcctccgccacacctttggaaattcaggtggagagaaacaggtgctcggttatccttattttcctcattctctgctttttcattttctgtgtaagtgaagatcctgaaagctggtagtttactaatttactaagaccattgcttaacgagagaaataaaagtttattataaaagttcattatatttatagtcttgataatgaacagaatttccctttgaggaaaaagcatttttcaaattcgacaatagattaaatgcattcttaagacgtgttttatagctccatttttcactcttagttttaaacaaatattaacattttaacataatgtattgcatgtgtagaaaatctgcttgtgaaaataactaaactaaaatatgtgactctaattctaaaagtctaagtcgcaagatgtcatttttgggggaagaaggccagatgtcggtatgtttgagactagagttctaggtcaaaaatatgtatagagtgtatcttacctcctttaaatgaaattcatgtgtttttaaggtgtattgcatagtcagccaactcagttgtctgccaaacgaggcatgcgacattatttatacaaaattatacacagatatgaatatataatcaagtatctagcaatttgctttttattcacatttttgtataatgattgaaggaatatcatgaacatgggaaacattcacattaatgggtatgcttaaaattacctttcactatatgaaattttcaccttgaaaaagaaaagtctttaagttagctcttctgtgcagattaagaaggtgtacaaaatgtagcttgtaggaagtttagcaaaagaacgcctagatcaaatgcctggagtttttactgcaggtagttaagtgtttctccggaagggagatcattcctattaaagagggaagcctcacactgacatttgcagctcatcaatgagctccatgaagggatgtttgagtttttgttttcattccgttgcctctcacctctctcaacctcaaaagaagacaaggaatcttccagactgtcagtggagcagggaggcctgaagatgcagccaggtagccagagagcgggccagggtgcagccgcctggtgcctctccaggttgcctcacacatgcagagtgaagccaggaggacatcatttctggccttttgttgttgttgttctttacaaagaaacattcgattatacaattgggcatcacctgcaagaagtctacgtcaaaaagacggtgggacacttaacgtgtctcagagattgaactatgcagttttaccacttttctggacttagggatccagttactgtaaagcagctttctttatcctgtttttcagttatgggcaggataagatcactcagtgaggattagccacagagctgagatttagggcacgaggttaaataatgggtggagctaagagattccaggtaaaaaccactggctttctatatgagcatatgtgaaatgcacggaactatttttttggtgggatggtaagaacaggaaaatctggacaatcatttatggattatgctttcatgggattagttaaaagacatggcgctgttacttgtgagcctttacaagtagtgaactaggaagtttatctcaatttcagacattaattttcattattcatttccccttaggccattctctactttaacttttctcctttaatgcctaaaaacgtttacaatgacttacccaataatttaaaataatagtaacgcatttctaaaacgatttaagtgtgtctttgttagcttctgaaagaagctagtgtgtgtttttcaaagttgtcatgttatatatgtggaccatttgttcaaccagaataaaaatggtctgaaacagaattattttgctgttggaaattactttattgtgcagaactgttaaaactatgtttttagtttaaattgctatttttaaaatgtgttgaaaaatatgcaagtagaatgtgagataatacttcactttaaaaatgaacaaattgagtaaaccatcctcagacttagtcctatgaaattttcaataactgaaatgcaaaaaggtggttgtttctgttgacattaggtttgtatgaagcaaatagaggtgggcaaaaaaaaatgagctccatctgagatagtaagataactttattcccatacaatacctgtgttttcattaccaaagtagcttgtgttttatattatcagatagaccttctagtaacagtatcaaattttttgcagataaggtaattccgatttaagtgacactttttttttttaaacttggcagtatttgactacagtcattccttatgagaaaaaaaacggaccaccgtctgttgaagatcttcaaatattaacaaaaagtgagcaaagacaaaatgaaactattacctgatttccttttgctgattggtaaacacctgactttagttggctgattttgttgttagtgttttgtcagtttaggatgtaaatgatgcatataattgtttatttttataagaatgaagccaaaaatggctgtgacattaaatacaacagtaactctagtgttgatttgtactttttctgtttttcttaccttgtgaaatatttatgagctaaaattttgggaaaaagcataacctaaatctccatcatctcttacatgtttaagaacatatccatttatcataaataaaattccttatggatcttatatatctatgattgtcagtaactgaataggaaagatttacggtaaacactttttatttcttatgaatgtagaacccgaggtagtagttataggtagaacataaattgacagtgatgttttaagaacatgcattcattcagcaaatatttagtgaaggcctactctgtaccaggccatgatctgggcacttgggatactttagtgaacaaagcagacaaagataatgcaccttcaaggggcttgccttaaaaaaaaaattgttagatttaaatatacatgatattgagtatctcttatgatggccgcaaatgagccttgaattctggttctatccctgttattttcagggatatccttggaagttacttactctcttttgcttacattgaaaaactaggataaaaaatatttgttctatttacctcacagtaaatagattaatatatgtatgattttggctaagttactatcaattagccgttaaaatggagggattgaatttgctgatctgttaggtctttgttatggtaaatatttatgatacttgctaattaggggggaaccaaatgaaagagcatcacatggatgagtatggatgatgatacttattttggaaatttaagaggaatgggcaaggaaaacctaagagtagaagcaagtgtcttatttcttagctccctgcctgctaacttggagcttttattctttcctttggtgaataattctttaaaaattttatatttaaatatggataaatcaagtgatgccagccagtctgaaataaaaaatcaagagattaactgggtagctagccctcttattttcaggaagaacttaagttatatgtgtccaagatcacacagggggatggttagttacagagctggatctcttaattcccaggcaattatacttttaatgatgctggtttttggtatgtgattttatttagaagttagaaaaaattttaaacatgattggaagcagaaatactgaacatggtagccctctaaagaagggaacataaatattgctcataagccaggaattactggcaggcctcagcttctcagatcaagaacaaatacttcattggtcaaactaaagtcatcataattccagcatcgagatgtctttataggttgtcacagtttggaatctctggacatatttgggtccaaagctccttttctttccaaaagaagagccctgtggagacagtcacagtgtttatggatatatagtcttcctgataaaagctattaggggattttgggtgcaataataatagttaataaaaatttaaataatttgagtagtgttagttacagttaatacatagcatgtactatgtgccaggcactatgatatgacctttatatctgaattagtagcttagtcctcataacaaacctttgagattaaatctaattattattctcatttcacagatgaagagcttggtgcaaaagtggttaagtagcttgctcagcgtcacacaattaggaagtggcagagccagggtttaaacccaggaaggctgatttgacagttacactattttgccttgtcgtattggtggggaaaaacagtgaaatatttttaccaggatgctttggagaaaatttgagttggcaatctctgttaaagtataatatttgtgagtttatctcaacctgaatggtctagcttaaaaaagaaaaacgttatactaggtggctgctttttctattttagtttttacttagaagataaatttgtcaaattagaatgaggctaattctcccaggtttctccctagtgcagaggaggcaacagccaggcagatgcccgatgctgcttcatggaagtctgttcttcatttgggtcttttctttgaaagtttctaaggagtctgacaggatacgcttgttggagggtatagctgtccatttctttaagagtttctctagtttgcttgatctgcagcactgaggttttcttgctgcacagagttcattgaggtgcacattatagtaacccactttccggtattattacagagcgaaggctccttgtaaataacccagttcctctttttttgtctccactgtttggaaattttaaatcagggaagcaactctcaggtaagtgggatattcttaccgaaaataaattcttgtggacttactccactaaaataaattattgggcctttattgttgtatccccttatcaggaaaatcacctataatttgtatgagtcagttatatcctataattaaggaagattaaggccacaatgattgaaattaaataatatttttgatctaaatttttaattgttgtcttttttcccctcttctattttgcagttcttcgtgccatgaaggaggacagtgaaaaagttccgagcttgttaactgattatattctgaaaggtgagttttataatggtataggtgcgatggctgggaggtttggattagtcagtaaatacatcgccttgctaatacattagacagtaacttcccaatgcacaactttcattaatcttattatgcagggtgaggattagctacatgactgacttctaccaacattatatatcatggttttatataatttaagttttattggaggttctgggttggaaataatctccacagttaaactataaacatcaagagaggtagtagaagaaaattagtgagatggcaccataatcatgtgggtatcagatgttggcagattggcactgggaaatttgagaagggtggtctctgtcatcttgaggacagtggaaaggaggacagatcattagtgaggacggatgaaggaaggaagagtcacatctgtgaacagtgccaaagggaatacgaaagggactgatgtaagacacagggagggaagcggggaaataaaaagaatggacttgcataaacccaggaaagtgaaaaagcagccacaaatcttagaggcaaggtgaggctcacacagggtgggaatattgatgaggcaaaagaagagtgagaggttgagttgctttgccgagaaaagagcaaagtttggatgataaagaagggacggaagaacttaattagaggcaaaattaatactttacgatgaaatatttttttaaagtagcaggtattcagggaccagattttgaaagcatcacaaaatgcatctttgtagtgtttgatcaaattttgagagcaatcctcttctagtaacagtcttcttctctgggttctctctcttctccattaaagttagctgagcacaaggaagatgaagatttctgagacattagaaacctctgatggtcttttcttaaaccatagtgtcatgaaaggggaacctcagtagtatacacagggtgctcaaagtgaatcacacatttcacttgtaagagtcttgatgcggtgagagtaagaagcatgagctagacactagtgggttgacactggagtagaacagactgagttgacatcattttaaaaaataagctttttttctgatggaggactttttctccctataaaattctgaaaaattttttttttaatacctgacatctttgtttgcttttgtgttgtgctagcattggtatgaaagctggattgttctgaggttcgttcttctagatgtgaaacaggaatgagacgaacataaagaacatgtcttaaattttaattatatcgggttcctaggcctctatgagggccagagatagaatgagcttctgaagcattctctagctattttagcatttaactgcatggaaggatgttatgacccaaagaacagagtcctctggggaaaaatgatttttaattctttactctgaaaacctaggactataattgtgaacctacctataccgcatgccttagggaagcagcacccatctaattctgctcctcatgctcgggccgctggctcctgtctgtaagcccagttctatctatactgtacctgcttctgatgagctgtctgtgtgcatgtgttgtggttttgtcttggctttgtattgtgaggactgggtggaaaagcagcaaggatttagactacagtggagactgtagtcagagaaaatgaagacgggagtgcaatgtggagatgtatttacccaaatgtgtgtgggaaggtggggaagtcgggtcattgaaaatgctcttttccacccatcctgaaagttcacagctggttaactgttcctcttccttggggaccaataatacgacactttgcccgggagggggatattgctcaaggggagaatactccttccccttttttgggtggtttgttgttgttttaacacagatgagagtgtggcttggctgcctaaatacaccacttagttttaatgcaaatgtcagaagtgaaagaaggtagaaaagtggtctcatttggcctgagaaaagggagtagggtgggcactgtatgggctaattgagcttctctttctcgcacctgcctaatgaccccactgcagcctgccgccactgctgccttgacagtagtacccaaggctgattctgaagtaatgtacgcgtggctgctgccgtgctgctagttaggaataaaaatgtgtgcagaaacttgcacccttctttgacttccctagggatcctgtttgttgtgtcacaagcctcatggtatagggcgaatgttaggggcttctatctccaagtggcaccctaagagacatggccttttggtatctcatttctgggaaattctaatgtgtgttgagagaactcatccttgttgggtatagcctcttaaaacctttaaaaaattgctacatagatctttgcattaacatttagttctcattacttaatggtttttaaatgtacatgtaaaatgtatgttttgtgtaaatgtatacaaaatatacatttgtagctaaaagttctctttttcttctagttctgtgtcctacatagagcagcaactttatctgcggtgggctccaagctagatttccgacagcattattctgagagctggctaccattacccttcttgctattggaaactcagcacatttgaacttgggtttgattcagtattaacagatcttgactacactaattctttatattatagaaccaacggaaatatgggcactattttgaattctagagatggtttttgttaaatctactaataaactgttctcttagtagattaagagagagtaatattaattgtgcatgtgcagttgtatttctcattaactgacagtatgcccatttgtttttatggctttcttatctaaactgcactgatgaactagattaaagccttgggagatttatactataaattcagtgatggcaagaaccaacactgtttttttgtgagaattgtcagtgtaactattacctaccagtattgttcagagagattgaaacagaataaacgggctgttcttgaagaagcaaaaccagaatatgcattactttggtttaatacttagtgctaacattgaaactgttggtggtgatggattttgtagcttgctgcttgtttcaccactggtcaaattttaaccattaaattgccattcacttttagaatcttgtatttaagttttgattttcaaatgttctgcttcatgtgtctgtgaagaattgtactttaagtgtgtgtcctctgaggtgcttgagaaagtgtacactgcagaactgcccattctcattactgtgtcctattttattcatgcctgtgtgtttttcttaagtatgaattctagatacagctacttatggattcatcaatatcatgagcacttttgctggttccagtcaaatcaatggcatttaataaattttttaagaagtaaaaatacatgtttgagagccttatatttgggagttttgtgttgtattttttttttccttacagtgctagattctttcccttaattccacacagaacccatcgctacaatatgtgagcagatgaaaccctgattagtcccagaatgctacgaaggggaagaggaggacgtttattagagtatgctgagctgctgtggaatgacagaagtaagtcctgctctttttctggggctgtgagacatttcaaaaacagccatgcagacccctcccatagacgacatgaatgaattaagagtctatataggacctgctacaggcggctttcacaattccacttaaacacctgtgagcaaaacaaacagggctaacatattcctcactccactcagcaactgagacaccatgactgcaaaggcaggggcgcggtttgaagtttaatgcctgcttggcatttcagccatcatctctaggggtatgagaaactcgagatggtttccttgttttattaatgttcttatttggaacttactggccctttccccagatacatgtacttacacagtaatattaataatttaaattaatttgaatttgtaaaaatgacgccttgtactgaagaaatgtagctttaaagggtatatgatatagtagaaagtccttagggggatatatttttttaaaggagattcaacattggtctgtttatagctcattcttaaattgatgcttctaaaatgtatgaaaatatacctatttattttttcctgtcagctcaaaaagtctctttgcagttaggcttcccctgatcgtgctcggtaaagtctttcttcttcagcatcgaaccactgtaggatttcccaccacagtcctcctgtgcgtagcaagttaattttgataccagctatgagcacgtttctgacagcaggtaggtttcttgtctccctaaaaacagcatcgctattctctgtactctgggagacacttttctttttgcaaggataccttgggaaagacccgcctaatgacaaaagcacgggacttcttgttacaccaggggttcattggactgataaccttaaaagtctttcggatctcagagatggaatctttttgcaagttacactgtgtgatttcaactcaaaatgtttatttcctgccaagaatcaagttgcagataattctcttacagcttttttgaagaaaacaaaaacaaactgtagaactatgatgcactccaagtgccatatatctattttattcttcaggaaattatatttttcttttacaagagcacaacaggaaccaaagtaaaagagtaatagatacagcactcaggataaatcatatctttaaaataataataaaaaaatttacaccttgtcctatatcctgttagtattttcataatatggccatgattgaaaaaacaaaaagcaagcatctacaattttttttgataaagactttttatgccaggaatggattaattaccaacaaaatttatactaatcaggctgatgtcaatctatttttgtaatgtatcattaacaaatttattttggaaaagataaaaatattgccccttgataataaatctttttttcctttgatgcaaacagctagaacacctttttctttttctttttgatattctaagacaaaaaaatggttaatcttcagattaataaattaggtcattataataataaattaattttttttaaagttcagcaacctctgtccaagtatttacaacaatacttgaaagttcctttacaaaacagaacacattttcttttcacgttaagcatactgggtatctgtgtctttcacaacaagcatttttaaaagaaaactcaatgcacaaatgggttaattagtataaaagtgctaagggctgtttgaaaagttaccactatagtatacagtcagttatatttgaggcatactacaacaaacttccagcttattgtggacaatattccagtagttgtttcaaaccattgtttgaaaaaaaaaaaaaaaaaatccaggagctgattagtgatgcagataagaactgccatcaatgtctctggccagtgagcaaattgaaaaccaactgaaagcaaatccaaatgaggaagattttaataaaggaatacccttctccatagcaggtgcaatgctgactgctcaaggcgtgcgtgcgcgcgcacacacacacacacacacacacacatacatactctcacacacacatctttccaattaaactgcaggtagaatgagattttgtgttattcaaaaaatttgtaagtgatcaaaagcactgctatggaatgcctgtttatctgcctttgttctggttaaaatctcataaaaatacattcaacaggaaaacataaattgtatgtgtataaatatatatgtatatatatatattatatacacatgcacacaaatacttttgttttttgaagcataagatagttacataaatactcctataattgctaaagtttaaagaggcatcattttttttgagcttcaacaaaggtgcttgaataatatacaattaaaatgaagtagtttctattttgtagaatcagtatataataaggaaaaagaatccccaaacagtctttttaaaaaaagtttcttcttaagctagagcttcaacaaaaactatgaacaaccaacaatataacagaacaaagcaacaacaaacagtgaaatatagcccctggaaatgcctggtgttcgtcaccctctccctcctcttcctgtcacgttgtaaaaaaaaaaaagctccagtgctcacatcaagaaatgacttagatcttgttcatgtgctgactctgctaggaactggctgattgattggcttggaagaaaataaaagcagcaaaaagtgtaactgtatatatccttaataacccgctttagagaaatgccgctatcgcatttctctggcttcctcactgcctactgcagttgtgactgtatagaaaagaaacttgtggctttagacctgggatggctgtcaaagggttctgatgtgctcgtctggtagttctaaggtggttatggcagctgggtcgcaaggccttttttgtttcctgctcattcaggcctgagctttgcagcaaccagtgcagtcttcagagcaataggaaaaaaataacctctgggccactgaactgcttttatgttaccaggtttctccccgagccaagctgaccaatttttcttcccaacaccaccctcccacccatttccccatccaaactcactgtccccaccccaaatatctctacagctatcttacaggcaaatatatcttagcaactttaaaaactttggttctaagaaaacacttggtcagttatcttgaggaaaagtgggaatgcttgttctgcacattgctgtagacagagcccatcccagtaaggtcttagcgctgtacatcaagtcacaatccaatacaatccactaagcaagtgcacaaattctagtttactttttagagcagatttagtcgtcttccgtcttttgaaacctcatcctagttgcctttcttcacactgtttggtagaaattgtctgcctgtagatggttctgtttttgcatgctgtagaagccactgaatcttgcatctggttctgcaattcttagcattctctgggaactgtccacctggactctggttcctttcttgcagtccacagatactagctgattatttaaggaagaaggctatttaatgagaggaggaataaaaccacaaaaaattagttgctttacattatctcaaatgaacagaaatttagtacctaactcaggtgagataacagtttcacaattcattgattgatagcctgtatgcagattatcacatcttgttctagtaccaactatacttttatgagggacactgacaaactgtattttaaggtgaaatgtcaagaaactgtcaaatagggagatgaaggaactgaaaaaaaaaaaaaaaagactggtgaaatgatttcaaatccttgaagtgcagaccttgtgtttcaagggggctgaagaatgagtggaaggtaggcagattttaaaaacaaagggatgacttctaaccactcagactgtacaacactatcataggctgggccagcctgtgtgttgctagtcactccatacactttatgagcgggtctgtttcccagctttggacactggcaactgtatcctgacccagcacagaggctgtgcccaatgtacatttgttcaaagaaaaatcggaggcaggataaccgcaggacagaatttttacatggaagggttaaccagatggtaaattacattacataattgttcaggctgtttccaattcttaaggtttatgattaaaataaaccaactcaaggcaaaaggtagaattagagttggaagggattatgatttatttcccttaattaatacagttttttcttgtctttcaaaataggcagatttagaggccctttatgtttgtactgaaaacaaacatacatcttttctcccttagtgtgaaatctgcctctccctaccttgtctactattactttccaccacctcttcatcttttgcgacctttccacttggtgcttgcctttggtgcactgacctgttccttttgccttttgtataccctcatgatcttccagccctctcctgagtattatctccatccctttgggactttttttctctcccaattctaagttgactgatgactaagaaatgccaggtgatcacgttttaatgtctaatataaacaatgatttaggaataaatccaggagtatttgttcatttgaaaacttcagagtacatcgagaaaactggatccatgtaaggttaggcttcattaaccaatggataatggataattcaccttgtgatcagtccagccctgggcaagtactatgtatttgattcatactatagcctggtatggatttgaggctatgaagagcaaagtaaaaacttcactggttaagacacaaggtttcaagcaatttcaatatgagtgtaagttttcctagattcatcattcaagagactaacttttgcaagacagtaccttagttggtgttcgataccagcaaagcagtggtatccactgtttcttctgattgatgaataggaatgctattataatagagaggcatataattatgggaaccacaactgaggcaatggagtccagtgaagaatcttcacttgggtgcagcctgttatctctgtaatctacctggaggtgacccatatctaggagaaaaaaaattataagcatttattacctaaaccagaattgttaaggattattttaatgacattgcaaatagagatcagcaacttggttttattgcttcccagttttttgaggctaaaaatgtgattaaaatctaatgttgatccaaagagctcttagtagagagcagagcgcttagggatgaatgttaaaaaaaaaaaaaaaaaaaaaaaaaaatcagagtgagaatcttaataattgggtaagatgatgccggctctagctaatcaaggaaataagaaggtgcttaggtagattttgaaaaagtgaattagaccatgaaaatattttgattactgttaacatacatggtcttctcagatttcgaaggagaaacattagctgatttattggcaaacaggagactagaacaaagtatgttcttttactattaattaattagtgttaatagctaagactaattagattaaaactaatcaatcaggaagttggtcttttggttgatactctggttcactgaactctaagcaatattgtcttacttttcataaacttgttgaaaatcttgcttaggcctattagatcatttttctgccttaatgaattatatcgcataggtgactacatttagttttgcacttatgaatgatgacctttatgttcttttaaaatatctctcttacaatgaatgttgcagacaaaaataaggttaaacacataccaatagggggcactccctaaagtttccttatttttatattctgttttgtttcaaataaatcattgtagtcaggttttctaaatgcattaaaaatcaatttagttaaagacacatgacacacagtatcaaaaggagttactcctaaattgttctggaaattcagctcatgaagtgacagagctttgtggtatgtaacactgtggtttaaaactcagattttaaatgatatgcttctgtgtgtgttctggaggggtggtgggagcagggaggaatgggaggtagaaaacattcctaatcattttagccagtgcagatggcaataaaactttatagaaacatattttccagcatcaagaaaaatgtcaaagagtaacattttattgatgaattcagattttaaatatacaatgaataaaagaatgaattttactttcccatattccaaatcaaatagaaagcagttttaggaatatgtgtcatacaagaagaataagatataaattaaggaaggtcttggtgaaagaaaaatgaagctgcaagtgaggtctgtttacaaaattcagtcttccagttctgtttctgtgctaaaaccaagccatcaaagttagctttgagctttgtagcagccaaagccaaaaacggaaacaactatcagtctttaatacgattcacaatgtcttttaggttaaaacaaatcagttgcctaggagaagcatacattttcttgctattgatgcatgagaaaatttctctttaggggctttataacatagatactatgcaatgcacaggtcttcagtcataagaatagtcgtacttacagtatgttgaagtctagcctctagaacagggtctggcatacagcaggcactaatatttactgactgaatgaatgtaagcataatgctaaagcacactcagaacaattatacagagagccaaaaacactaggtccaggaatttgactttctggtcatctggtttgatccaagcataacgtttagaatatctagagtaacagacaattaatctctctcaagcaatgaatattgcttcttccaaaagaaatataagttatatagcaatgatttggaaaatatggttggaggacacaggaggcagtactgagtcacggctaagagcaagtttatactactgatcaagaagaggtctacttttatagaaaaggaaatagtgacagctattgggagacaaaataacatctttattacgcacagactgaaaggatagagcaagataaaaaggcatggagtaaacctggtgactagaaaaatcaacataggtgataagtttagctcacatgaagtgaaaactgcccagaagtagagggtaacctaatgtacaaatgctcagtgcggaatctacaagagacagtgactaattcatgattactctccttacaaagtttatatatacatacgtttgagagatggcttagaagttccagataccaggctcttatgactaggaacatatttatttccatttatttccgtcatcacaaagtctctgagcacagagggccaggaaggaggcatttaatccagttacctgctgacttattttatcaatgtgtggtgtaaatatgtttcagccaagcaggtctgcccgggaatagttatttgaatttacttcagcaagtcattttaaaagttactcataggaaattttaaaaattagaaaacacctaagtagaccacatagaaaactagcagatctcagctgccttcaatgcttacctctagggagatggacgatatcattttcactaggcgtgggccacaggggaacctccaggtcaacctctcctcgatggtttgtcttctcaatgggtatattggttggttctgggacatacatttctaaaagaagggaacatttttcctaagagatgatgaagctgctgtattgttggcttttgtattctcaatccaaatggtgcactcaattcaagaccacatttcctgggacatgaaagatgcagtttctgccatttacatcattcatcactcatgctagagaatcacgagctttgcagtgaggagaaacatgtcttataacatttaaaagatgaaagaattctctactccaccagggtcaaaaactgctttttcacgtcaaatggtgttggttttataattttatggaaactgaaggggactagctgaagttatttattactttccagcagctaataaatgttggtgtttaatagctgctgctctttaatatgggggtattgaataacttacataaaatatgttagcaaaacttgaaaaagttaaagcactgtccacttcttatggacttcttggccatttcctctcctttctcttcccctaaatgggaatggactgtaggtagacctcatgagtataagtctcagatgtccattatgttaccactggaaccatttagattagaagctgatcttcagtaaatatatttacattatccagtttgatcagataggtattatactacaacataaaacaaacagaagaatattatttatctcaaatatcaggtctttttaaaaaaaaaaaaaatcagaacttttctcagctcctacaaatatttctttgtatttatacttcatccagctaacgacaactagccccacattttaaagcaattaattcttcagaacctgttttcaaaatgtgacaataaaagtttgtgtcatgcacgtatttcctttcgggcagatcctgccatattattcactgatttttttataaagcaattactcaacacgtaggatcctaaatactcaccatagcctaatttagaccaacataaaatatacagtataagtatataaattaaaataggattaataatcccctctgctcagagtgattgttttctgtctcaaagttaacaggcttttgagaagtaaaccttaagatgactttgagagaagaggaaagtgatagagaagagagtacttgctaagcttcccccatgagttaactgggtacccagccagggaaagaaacccagagaggttaagttaaatcgctcaaaatcatgcatctagtaagtggtagagctgggattcaaatgcagttctgtgattccaaagcccaagttatcttgttgcctccaagaatagtcttctgctttcttagttatattataaaacctttaaacataaaaagaactgggaacaattatagtttctacaggttcagtgcatccctgcaaactcgagaattaaaaatagaagttactgaaaacattaccatttgcaggtgcaggggcctgagcacaaaccagtgactctcaaatttttaaaaatcatatcagaattacccaaagagcttagaaaatgtgctgactctcacaggtcctgattcggtaggtctggactaggtgattccgggaggtgtgtgcagggggatggtatttaatgcacccactgaaaaactctcatgtgtggtatgaatttcctgggtgaatatgggcagaaaagccatgtcgccatttacttgacacctttcagtgccacacacacccttctgcccctcccctgcctagtccagggcttcacactgagccttcctatgacaataggggccgaactgccactggtttctgaggcctcagtgtaaagggcaaatgcgacaccaattccaacaaacctgtaaatgtcaatggctaagtagtaaaagtttctgcagaggccccagagctgggattgattcagttccacctcaggttttttcctgagtgagagggagagacgtaactttggaattc

SEQ ID NO: 22658 - DNA, 211466 bp, Homo Sapiens
gaattctgagatatttacgcatttacatcttaaccagcattatgaacaagaataagagtgtttcaacaaaagcactgcattatgatgatttataaaagacacatctgggtttgtattatttaagtctaagcactcagcatatgctaacatttgtgtgtcattgttgctttattattattttttttttgccttttatttctttatacctgaaagtatgttctttgatccttatttaagttcttagacattttatgctaaagcagggatatacagcttagagaattttaggtttgtattctttgctgtttattgaactgttgactgattgtaccaaactggatctcctgcccttgaataatgcaatagtttgaggaagttaagtatagttttccttaacatttttggacatctgctgatagagtatggacacaaaatctttagtgactaaatttctacttctaaatttgtacattttatatctatttaattttgatcctgggacacccaagaatgtgaacgacaaaattgtttccatagcagaaagttttaaaaaattgtttactgatttaattgtttggtactaattttaattttgctgtatatactcaaagctgggaaaaagacacagcctgtattttaaggtcagtcatatagattctcatgaactggaattagaactgagtgatgtttatatgcgatgctgtatcttaaggagcttaagctaagtgggatgtgaattgttttgcgtattcaatgtgtagagcatgttaatcatcaacatcatttttaagggtttgaaatttcattagctttaagtttttttataattagatacaggattaaatagacaagctagaaatatataaaaagaaatatgttaaagcaagacttttattactttcaaataaaaactgtgtatgattattttaaagattattaaggcttctttgtaattagcatacatttattcacataaaaaccttaacttattcaccattctccatattgtttatgctctatacttgtgtgtttaacaaagctaaattaacacaaaagaaagccagtttgattcagcataagttttctcataattcatatatttttattgatatataaatagttgtacatatttttaggtacatgtgatattttgatacctgtatacaatgtatagttatcaaatcagggtctgcataaattatttgtattatggaaatttgcaagcacacacaaaattaaagagaataatataatggacgcccatttactagttaccttctttaatagttgtcagcatatagtcagtcttgtttcatctattcttcccttcactagattattttaaagcaaactccagatatcatattattttgtcattaatgtttcagtgtgtatctcttacttataagactcaacttatatgattaataagttgactcaactatgactcgtctataatgttattaaaattattactattctttaatattatctaacattaggtcagtgaattgacacaaactctatagtattagccaagctatactaatctaggttcttctgtaccagaaaatctcatgggagaaaaaaatagtataaagcagaagaccatggcaatcagccacttatttttgaagtcgatagagtatttatggcttataattagatgtatctggtatgattttgtccaggtggaatattttaaatcatggggtgagcctatggaaatataaaactgaaaggactcagccaggcgtggtggctcacgcctgtaatcccagcattttgcaaggctgaggcagtcaggtcacgccgtcaggtgttagagaccagcctggccaaaatattgaaacctcgtctctactaaaaatacaaaaaattagctgggcatggtggcaggtgcctgtaatcccagctactcgggaggctgaggcaggagaatctcttgtacccaggaggcggatgttgtggtgagccaagatcgcgccactgcactcctgctctgacgacagtgtgagattccatctcaaaaacaaaacaaaacaacaacaaaaacaaacaaaaaaataagcaaaaacactgaaaggactcatgatggggaaggaagctatataacatttttattaggagaggaagagggattaccctaagacaagggggaaaggggagagattttgagaagagtgagccatccgtgacagtgacttagagggtttctccagagaaataaataattctaaaatggaagagcaatggaaaactatagaaaattatgattgaaccaaaatgatcaagatatatgaaagtaaaaaggaagaataaaatatcgtaaaaatcagaggcactgataatccaaaaaaggaagataaatattaatagagaataaatattcagtgttatcaagtaaaaagttttaaaataatatcaaactaagtacttaattaaattaatactaactgaacactaagtgttaaatatttttgagaaacataaaagaccatgtttgactggacacagtggctcactcctgcaataccagcattttgggaggtcgaggcaggtggatcatttgagcccagcagtttgagaccagcctgggcaacatggcaaaaccctatctctacaaaaaatacaaaagattagctggtagtggcgtgtgctggtagtcccagctactctggaggctacagtgagaagatcatctgaacccgagaggttgaggctacagtaagctgtgattgcatcactgtactccagcctggatgatagagtgagatcttgtctcaaaaaaaagaaaaaaaaaagaccccatttcccacatttctacaattttgttataaaatatgcatgttagtaaactataaaatggaaaagggctgggcatgatggctcatgcctgtaatcccagcactttgaggggccaagacaggggggatcacatgaggtcacaagtttgagaccagcctggccaacatggtaaaatcccatctctactaaaaatacaaaaaaattagctaggcttggtggtgggcacctgtaatcccagctactcgggaggctgaggcatgagaatcacttgaacctgggaggtaaacgttacagtgagctgagatcgcaccaccgcactccagcctgggtgacagagtgagactccatctcaaataaataaataatataaaataacatagaaaagttgtcgtaatttacaattagaaataatgggaatggctgggcgcggtggcccacacctgtaatcccagcattttgggaggctgaggcaggcagatcagttgagaataggagtttgagaccagcctggccaacacggtgaaacccaatttcaactaaaaacagaaaaaaattagctgggcgtggtagtgtgtgcctataatcgcagctacttgggaggctgcttgggaggagaattgcttgaacctgggaggtggaggttgcagtgagccaagatcacgccactgcactccagcctggacgacagagtgagactctgtctaaaaaaaaaaaaaaaagatacaacaatggggatgttttgtcatgtacgtaatgtagattgatgggccctaatagaaaacgtaaatttaaaaatatttttccaccacaagttacataactctgttgaattactattaccacactgatgtttatgtagattttgttactttatagcaagagtcatttgaggtacacagctgattggatctattcttgacatttttaacagttggaaagagtgtaatgtcatggttaacagtacagactccagagttaggatgctggggttgaatcttggatttttacatttctctgtatgtgtgcatgcagagatggaaggataatataacttttcctacttttttaataaaaatgttttatgttacagattcagtaatcagatatgcttctacaattaaatgttgaaatactgattactcacctctttttcaggagcctagattatggaaggaacatatcatactcaatgcttttcatttcttgtgaaacagttattttccctcactgcttcatcttccctgacccccacgctagtcatcatcaacatatttgttttcattttaacatttagttgaaacctatcttagtcccttttgtgttgctgtaactgaatacctgagactgggtaatttataaagaatagagacttatttcttggttctggaggctaggtcaaggggtctgcatctggtgagggccttcttgctacatcattccttcagaaggcggaagagcaagagagttcccctgtgtgcatgtaagggtcgggggagggggaccaaatcatccttttttcaggaaccaactctcaataacagcattagtccgttcactaaggcagtgctcttatgatctaatcatctcttaaaggtcccacacttctcaacactgttgcattggggattaagtacatttcaaacaatagcaaggactgacgccatgttgcaaggtttgatattacagtaaacagaaaggtataaggttgttccctgattctaagcacttgacagtctattgtataggagactgtaagtaaaggattcgtagtacttcggtatagcctattcaaaattcccattgaagtatgctaaatataacatccttttagtgttttattcatgttttctctcttacacacacacacacagtgatcaatggcaaatgcacataggaaactactaaattaccgtggaagtattttaacgttttagaaaaactttatttgaagatttttgatagcttttaatttggttatatacttttagctttagagccatactgtcagaattttggggagagaagagacattgcagaccaaaacagtgacacatttatgtgctactagaaaattacagacattttacaccaaaaaagaattaacctgctgcctattgcttctctttttttttggcatttgatgttgttgctgtaagactattaattttaaactagtgctataagcagctggaagctttgattctggtgattcatcccgttacctctgaacagatgaaaagaagtaaatgaattttgatgttgaaagtcccctttcttacaaaaatccattaatgatgttaattaaatgaatatttgcctctttcagctgtctagctattgaaaattgggcattagatcacttttttaaactgtgaaagtttctttattgtgccatttaaattatttttaagtggccaaatcagcggtgttaagtatgtacacattgttgttcagccatcaccaccaatcgttctccgaaactttttcatcttctcaaagtgaaaccttatacccattgaatgctaacttcccattctttcctgcctccatcctctgtcaaccactgttctgctttctgtctctatgaatttggctaatgtaggtagttcatataagtggaatcaaataagtgtctggcttatttcacttagcatagtggctttaaggtttatccatgttagagcttgtgtcaggagcttacaattgtgttgatccattcaacagagtggatctgtcattctacagacacttgggtttcttctatcttttggcgactgtgaataatgctgctatgaatattgatatagaactatctgttcaagtccctgctttcagttattttaggtacacaggattggatttgttgtaatacatggtcattctatctttaatattttgaggaactgtcatactgttttctacagtggctgtaccattttacattcctactagcggtgcattatagtctcagtttctccacatcctcatcaacactcgatattttcttttttctttctttttttttttttttgttttttgagatggagtctcgctgtgttgcccaggttggagtgcagtggtacaatcttggttcactgcaacgtctgcctcccaggttcaagcaattgtcctgcctcagcctcctgagtagctgggattataggcatacaccaccacgcctggctaatttttgtatttttagtagagatggggcttcaccatgttggtcaggctggtctcgaaatcttgaccttgtgatctgcctgcctcgtcctcccaaagtgctaggattacaggcatgagccaccacactcaatctattttttttttttaaataatagcaatcctaatgagcgtgaagtgtgaagttatataggtatctcattgtgattttgatttgaatttccctaatgattagtgatgctgaggcaaaagaacattataataattattgaccattactttaactttttaaaaaatagatacatcatttctgatgcttatgttcagtgtcctattattagaataaatttttcctcattggtatacaatttctcaacttcatttatatgagagtggcttttaaaatgatccatggtgtttattgtgttacaccctactaaggacagtcacaaaaagattagactctaaattgaaataaaattgttattcttttcacatgtagtttagagaatataattttgggctatacttttgagcttaagcttttaattcattgctttaaattttaaatgcttatggtaagagaataaagagctaccgctctgcagccatagagaaaccttacattcaacaaggttcaaacaaggccttacaaggctaaaggctactgttcgctagaaatgaatgatttatcagaggggaaatatgcacacataggttggtagagataatgagaactgaggaactagcaaggcttaaaattgtcctgctagttatattgatttaaagactctttcctggtatagtagttcctccttatctgcagtttcagttactcatggtacaatacagtaagatatttagagagagagaccacattcatataattattacagtatattataattgtagtattttatcattagttattgttaatgccatactgtgcctaatttataagttaaactttatcatatgtatgtatagggaaaaaacatatataggatttggtgctatctgaggtttcaagtatccactggggtacttggaatatatctcctatggataaccaggggctactgtatattttcctcttgtatagatacaatgatttggttggaatgaattgatctgatatgtcccactctatgcagttatgttaagtatttacaaaaagggatctttactaaccaaaagattttctcttttaataataccttacttggttgtatatgaaaagttgcaaagctctgtagtgtttctatgcataaaacttactttatttttggtattttgagtattttttaatttttctataatatgttattttttaggaaataataagatctatgtaaatgtatttgtattttaaatatcttttccacagatttgtaatagaatttataaaaagtaaatgagtaatatttctggagattataaatctctgtttactaataatgtagtttacggggagtagaaatacagcgtttttcatggaatcctaacattccatcactgttacatttagcagatatattaaaattatggtttaaattatttagttggtaatttccaatttaaaatggacaaaactcattttcttgtgaatcctatctacattccattgctgttgtatttagcagctctattaaaatcatgattcaaattattagctggtaatctccaatttaaaatggattagcttcattttcatgtgtcttcatgtatttataattcagtattagatataagtttctttctaaaaaactgcatatatgtactttaaaacaagaatcgacaaagaaacaattgttttattattagtcctactaaaattgaaatttgcttgaaaaaatgttattatgctatgtttttaaaagttggtaacctgaaataattaaataagattatgtatttaatagcctgccctcaacacttacgcatttttagtgaacattgctttttataaaaatataaaatgttctcttcccacgttctttattgagagactagtttgtgccaggtactgtggagcatacaaatagacatgaaatcattgatatattgtgacaaggcagaatattgactaacaaaaatacttttattttctaaagagattatgtgataaggtttggatatttgtctcctccaaatctcatgttgaaatgtgaccctccattgttggaggtgggcctactgggaggtgtttgggtcatggggatggatcccttatgaatggtggtatggtttggctgtgtccccactcaaatctcaacttgaattgtatctcccagaattcccacataatgtgggaaggacccagggggaggtaattggatcaggggtgccagtctttccctactatcctcatggtagtgaataagtctcacgagatcccatgggtttatcaggggttcccacttttgctttttccttatttttcacttgctgccaccatgtaaaaagtccctttcacttccctccatgattctgaggcctccccagccatgtggaactataagtccaattgaacctctttttgttcccagtttcaagtaatctttaccagtagcatgaaaacggactaatacaaatggcttggtgccatctcgatggtaatgagtgagttctcattctggtagttcatgtgagagctggctgttttaaaaaagtctgggacctttttcttctctctcttgctccctctgttgccaagtgatgcacctgctcctccttcaccttctgccatgattgtaagtttcctgaggctctcaccagaagcagatgtggacaccacatttcctatacagcctgcagagccatgagccaaattaagcttcttttctttataaattagccagccttgggtatttctttataacaacgcaaaaatggactaacatagaaaattggtactgaggaatggggcattgctttaaatatacctgaagatgtggaagcagctttggaactgggtaacaggcagacgttggaagcatttggagggctcagaagaagacagaagatatgaggggaagttgggaattcctaagagactttttaagtggttgtgaccaaaatactcacagaaatatggacagtaaaggctacactgatgagatctcagatgaaaacatgaaagttattgggaattagagtaaaggttacccttgttacaccctagcaaagaacttggttacattgtgtccagaccctaaggccctgtggaagtttgaacttaagaatggtaatttagagtatttggccaaagaaatgtctaagttgcaagacattcaaatagtggcctggctgcttctaacagcctgtgattagattcaggaacaaataagtgacttaaagttggaacttatttaaaaggaaatcagagtataaaagtttggaaaattttcaagctagccatgtggcagagaaagaatattttcgggggaggaatacaagcagactgtggagcaaccacttgctagagaggttagtgtgactaaaagggagccaagtgctaatatccaagacaatgggaaaaaggccttgaaggcatttcagaagtcttcaaggcagcccctcccatcaaagacctagcgacctagaaggaaagaatggctttgagggccaagctcaaggccctgttttcctgcttagcctcatgacagttctccccatatcccagccacgccagctccagctgtggttcaggtgctcaggtacaactcaggccatcattccagagggcgaaagctataagccttggtggcttccacatcgtgttaagcttgcaggtgaacagaatgcaagagtcaaggagacttgaaagattccccctagatttcagaggatgtattggaaactctgggagcccaggcagaagcctgccacggggcacagtccctgcaggaaacctctgcttaggcactacagaggagaaatgtggggttggagcactgcctagtggagctgtaggaaaggggccaccactgtccagacctcagaatggtagatccattggcagcatacaccctgagcctggaaatccacaggcagtcagctccaacctgcgagagtagccacagaggctgcaccttgcaaaaccactaggatgggccttgcgagcctaccccttgcacagtgtgtcctggatgtggggcatggagtcaaatattattctggagctttaagatgtaatgactgttctgctgggtttcagacttgcatggggcctattgccactttgttctggccaatttcttccttttggaatgggaatgtttaccttatgcctgtagcaccattctctcttagaagtaaataactgattttttatttcacaggctcataggtagaaggaacttggcttgagtttcagatcagactttggtctttgggacttttgagttaatgctggaacgagttaagactttagaggaccattgggaaggcatgactgtattttgcaatgtgagaaggacataagattagggggccagggatggaatgatatgatatggatttctgtctccaaatttcttgttgaaatgtaatccccagtgttataggtgggtcctggtgggaggtgcttgagtcatgggggtggatccctcatgaatggcttggtaccctcctcatggttatgagtgaattctggctctgagttcatgtgagagctgattgtttaaagagcctggcacctccccccacctccttgctcgctctttctctctcaccatgtaatatgcctgcacctgcttcaccttctgccatgagtaaaagctccctgaggcctccccaaaagccaagaagatgctggcaccatacttcctgtacagcttgcaatactgtgagcctattaaatctcttttcttcataaattacccagcctcaggtatttctttatagcaatgccaaaatggaataatacactatcttaacttttcccacttactaaataattaaatgttccctcttacagtttccaagcttcgtggctctttccttctaaatcagacttatatatcaacttttaaaattgcaatgtcttctcttaacccagtgtacccttcatctatctccttatctctctctccttcacagctgatacatatgcttcttcattagccattcattccttctaaccttgtgtaatctggtcttctgcctgagattccattttacaaacccttatcaggatcactagtgacctagagtttagttctactctattttgtgactaaattaggactccttggctcttctgactacttttaaacagaagctttcctttactcccaggacatggttcttttgcattccttattcctcctctgtttcttgtagtgatttctcttttgctgctcatttcttaaaaggcaatattccaagggatttaattttttgtccttttctaagcttccttgtgtccaaccacttgtgattactgattgctactaaatctttagcccagttctggggtcatcaattcccattgtctctttctgctttcaaaataatcacctaattctacattttccacttttcttcaactccaggattaccatcctagttgacatcactttgatttgtagtctctgatgttcttgtggctgctcttgtcttcctatagaccatttgctacacagagtgattctttaaaaacgtaaatcagatcattcaaatcatgtcactttctgcttaaaactttccaatagcttttttaaaacaaaacaaaacaaaacaaaacaaaaaacaagatgaagtctcactgtgttgcctaggctgacctcaaactcctgggcctgagtagctgggactacaggtgcatgccattatgcctggccctgtaactttttatcccacctgagactaagacttggacttgctactattgacgacatggtcttatgtatgatctgctcctgtgtgcctccatcccttcacattcaccatgacacagacacatttgccttttttttgtttcatgaatgtggccttcatgaatgtggccaagtctgttccagttttaggagcttgacactgtttcctctttcccagaacttcacaaggctggctgatggttgagtctgagctcaggtgccagttctttcacatagccttcccagattgcccaatctaaagtaccccttccccttctagtcactttctctggtacataattcagttttattttccttataaaatgtgtaacagtctaaaattattttttttatttatttgtttacttctttatgttctggatgtaaatgctgtaaagcaggaccaggtttcattgttgatcatggctgtgtaaccccattccatatagcagcacctgaaaactggtaggtgttcaataaatattggttagatgattgaataaattgatattccagttgcctatttgccatgtatacgtagattattctaaaatgcagtgttttgaaaactgaactgaccttcattatttatttatgtttctatatttatttatttatagagatagaatctccctcttttacccaggctagagtacagtggcctgatcatggcccactgcagcctcaacctcctgtgttcaagcaatcctcttgccttagcctcctgagtagctggcactgcaggcacataccactatacttgactaacttttttattattgtttatagagatagggttttgctctgttgcctaggttggtcttgaactcctggcctcaagcagtcctcctgcctcagcctcccaaagtgctgagattacaggtgtgagccattgtgcctagcttgaactgactcttctaagcaccaaccagcttccttgacctatgtttcttctcttgttctaggataccaccattcactgtttattccagccagaatcctgggaattatccttaattcctgcttcctcactgctcccaaatctagtttattgtcatatgttgttggttctctctattaaatttctgctctccattcctgcagcccattctgtttaaccacttcagggttctattgttgcttatgatgtagccataacctgttcaaatcctccctgctgccaaaatgatctctataaaatataaatactatcactgttactcccctgcttaaaattcttcagggcgtcctttatgcctttgtagtaaaattaaaaattttctaggaccttcatgatatgaccctctggcttcatttctcagcctctgactttctctgtggttagttctccaaacatgtcttagtctttcattcttccatgcctgttcacatgctttcctctttgaaacattcttctccaacgctgttcccaccctatatcacccaactatctcctactcatctcacgacactcagctcttacatcttttctgaaacgattttcctgtccctagagcacgctctcggctagactggctgtcactggtatttgctttgcctccagcttagcttagtttaacatataatatatcatacttgtctctttacttgttcatcttcctttctagattttgatctcattgcattttgatgacctaccaaagcacccagcccacagctgctcaacaattgtttgttgcctgatttaacattgacctagaccaagatttctgaacttgatccttcatgatgtccctaaatgcctgtaatgtcatacaaaatgtcagggttatgaatgatttctctggagacacagttcatattaagattcttaatctttcttcaataacttgaagaatcaccaatgtggtcttttggtacagtattaaagtttaacatattttgaattatataggtgccttcccccaccttcttgctcattgttagcacatatagcttaatttagaaaatgcttataaagtatggctttcctcttgtttgggaaaatttgagcagttgggctcactttggtagatagtgctgttgaaaggctatagtttcagttcctgttattgtcatcttcacagagaaaatgaccctctggcttcatttctcagcctctgaccttctctgctgttagttctccaaacatgtcttagtctttcattcctccatgcctgttcacttgctttcctccttgaaacattcttctccaaccctgttcccaccctgtatcacccagctatagaaaaacgtgttttaaggccataaattctgtctctagataatattcagacagatatctcagtagctggaccttcttactacctgggtgcagaaattcactgagttttgtccgggggctcagttgttgagaaaggaagccaaaggaaacttgatctttatggcgtgatttggaattagcttctgcttttatcagaattatgagtgtgaagttctgtcatataatgatatcagaacaacctagttcattcccagacaggcagaaaaagaatttttgtcctctgtctcgtattttgaattgtggaataaaaatggattttatctggctatatcatgtaagaaagcatccagagtacatcctttctagtatatagcaattattggtttagtgcctgtcttagaaatttactatgttttaatattcactcaaatatcaagcaattaatgattaattttcatattgtcagaatactcaaacttttaagctgttctggggccacgttagtataaaggctaaacctaatttctagcatatttaatgtagttattaaatgtaaaaaaacaagcacatacatatatatacatacacatatatggataaatggactagaagatttagattgctgaatatctgtggatatttacattcatttgaaataaaaatatatacatacttactgatgaactgatggctccaactaaataggtacttcagcatgttttaaaatattctttaagtgttctactctttgaaattttactgagtgttaacatgtttgcaggttctgtaataacattcagttaccataggcacacatgcaaatagatttaggtttattgaatcattagtaaacttgaaaacattatttattgtttaagaggaaatgaaggattcaggcaaaatacgaaaaatatcttgaagattttgtgtgtatgtgtgtacagctttaaaacttaaaaattagagaagtaatatgaattactttgcagaaactttagaaaacagaaaaggtaaagaaatatgaaacaccaccatctcaaaacagtaactgttaacatagtgatgactttcttccagtcctcttttctatgcattttgaaaattcttatagggaattttatagggaaaattgtgcgattttgtgtcctagtgttttattccctcacttagtcgtatatcataaacattgttcttaacctttgttttaatggtttaaaagactgtgtgcagtatatacaaataatttgccttttcatttcccagttatcttacaggctgtttcctttatttaatgcagactgccaaccaaccacacacccaaacatctttgattcattaaattaaaggtcttgttttattttctaattttaaatatatttcgtttaatcagtcagtcacctaattttaactaccagagacccgaacccctacccaaaccaagaactagaatatggccagtcttatatcttcatgtgtgttcttgtcttgttacattccctgtctgcttctagaggtaaccactcttttgaattttgtgaatgttgttcacctgttttttgttgtttatttgttttgtctcatatattggtatgcctaaacaatatattgcttggtttcacccattttaagcttaaaaaaggtattgcagtatatataatccattagtactttcttcctcttaacattgtattacaaagattcattagttttgttatgtgtagctgtagttgtcatttttatgacttattaataataaatagaaaaagtcacaatttacccagtaaacacttgggttattagtattttttgtttcattttacttttacaaacaatgttgttatgaacatctgattcatgtcttctgtacacatacatataattttctcttgagtagtgagtggaaaaaactggttttcctttgttctcacaccactgcagtcggcacagaagccttctttgactaaatgtacggggatttctcccctccagcaagcaaacaatcagttccgcagtggccagcagctggtgtcctccaattcagtcctcacactgtctgccgggacacagcattgttttacctgtgcttctggtcagctgactacaaaacatacttcctatgacctcctcctcttcgagttaattaatttgctaaagtggcttacagaacttagggaaacacatacttgtatcttctggtttatcataaaggatattacaaaggatacacatgaagagttgcattgggcaaggcatagggaagggacatggagcctccatgcccaatctgggcataacaccctccaggaacctctatgtgatcagctctctggaagctctccataccccgtcctcctcggccttttatggagacttctttggataggcatgactgaagcatggacatccatgtattaatgtgattggacagaaaaggtatgctctaatgctaatggactttgtggaggaaacccagtaagccttatctgttcagatcttcttggcctttctatgtagcgttttttcctcccaggtatagggtaggaccccttctgaaatgtaggttttatgacctacaattagacaaagtaggtgagggaattttttcatgaccagctccaagacaggaagggtgaggaagcattcctgccttggggagaaaaaggagctggtgaaagagagggcaggggaagctcagagagattctgttttctgagggctgcttctgaggcctaaagtattccaacataataacaaaagacagtaacaagggctaagggagttatgagccaggaactatggacaaaaccaatacatatatatcataatatactcaggactggaattgctgtgtcttggggtatgcaaatgattaactttatagagtcacattcttatccaagatgtatgagagatgctattgatctacattctatccaacgcttgacatttaaaatttcgataattattaacagtagaaaaggatgtcttattgtgcccttggtttgcatttcccttcttgctaatgagtttcaacatacgtgtttcctattctgtgaaatgcctgttcaagtcttttgcctgtttttttttccccccattggatggtctttctaattgtagaagttctttatatgtttagaatactaatagtttgtcagttatatatatgataagtatactctctcagcttgtatcttatattttcattttctttaagatgcctttgataaagaggagttcttttgtgtagttgaatttattcatcttttcttttatggctagggtgttcaggatcttaagaaattcttccttatgccatcatatttattttcattcataagttttaaagttttcctacagacataaaagctgttaatccacttgaggttgatttttgtgtatggtgtagaattccaatttcattttgattcatataaataaacatttcttcatgatatatgcatatctggaccctggggggtttttgcttactttattctgtttgtgaatttgttcctgcaccaataccatgctgttttacttactgcggctttataattagtctttatatccagttgggcatgtcattccttcttttcttcttcagaagtgtcttggttattcttggccctttgttgttctctaatacattttgtagataaattaattattcattacaggctatgctggaaaaccactgcctttccacttgtgcacctgtttctataaaactcactgctctcagagcagagcaggatatctgctctttgtaagtaaatgtgtcccaaagagaggggaaggggctcagctattcatgacaaactgcataccctacatgcatctataagagaagtcactctggtacctctgggaaacaccgggtgagggatggcgaagaagccaggggagcgcagggaaaatcctagaaggaaactagaggagaggtgaataagaccaaaatttccaagactgactctttagaacaatcacagtgcactgacacactgtgagagctctgcctcacagcagatgggcctttgtgtatatttattctacagaagaaatcaacttctgttgtattaaagatcctataactatggctaggcacagtggctcacgcctgtaatcccagcactttgggaggccaaggcaggtggatcacttgaggtcaggagttcgagaccagtctggccaacctggtgaaaccctggctctacaaaacttacaaaaattagccaggcaaggtaacacgtgcctgtaatcccagctactctggaggctgaggcacaagaattgcttgaactggggaagtggaggttgcagtgagctgagattgcgccactgcactccagcctaggtgacagagcaagacttagtctttaaaaaaataaataaataaataaaaatagaaaactataatttttaaaatcttttttaatttaaataataatgatcaacattttatttaagaaaaagatttgttataatgtatatttataggctattatcctagagttactaagtctttccacattgatacctcatatgatgaagtattgagtagccttctgtacttcctaaaatgtctttaagaaaaaacagcaacaatactttgaagccagagtgtatgtaatgccattttaccgtcctcctgcctcctcccctagtttgtttttgagaagtagagatttttagctgagaccacagctattctaaaagttttttatggttactttctcccttatatgattatattaaattattatgtttaaaatattatgtaattgttttccctaaaaggagaaagttatgtaatataagggagatacctgctttgattccttctaatttcctgtcagcttaagctagcacagaagatcctgtgagaatgtgtcaaatgcctcactaggaatgaggtgtaaattctgtgggcaatattggccctaaaatcttctattggttcaatataaaacattcagagtaattacctttctgtgttttttatactagagtggaaggaaagtaataaatagtggtttctgatatagtattcttcctcagagtgtggaactcttagtggaccaggaacatattggtagcataaaaccatttttttcttttttcgaagcagggtctctctgtgtcacccaggctggagtgcagtggtgtgatctcagctcattgtgtcctcaacctcctggctcacgcgatccttccgcctcagcctccagggtagctgggactgtaggtgtgcactaccacaccctgctaatttttgtattttttgtagagattggttctctgtgttgcccaggccggtcacgaactcctgagctcaagcaatctgcctacctcggcctcccaaagtgctgggattacaggtgtgagccactgtgcccaaccagcagcataaagctttacgtacacgcctatgcatacatatatacacatatatattttgccagcatgtagtcttatatacacactcagatacacatatatgtgtgtgtgcatgtgtgtacatgctcacacacaccctgggacaccctggattatgctataggaaatagagggataaaggacagaaagtggcaaattacaaaaaagcctgtgaatgctgctgggaggctttgcatgaagcagtatgggagcccagaggaccgccagctagcagacctgcagcccaaaacgctgtgtagaggtttgtcactctaagaaagtaggaaaggaaatgtcccctcctaccttctctgtgactcccttttttaactcctacagtttggtacatgactaggttttccccagcattctctgcttggtcccctcctctcttcttttccttgttacactcatcattacctatcacctgactgggaatcatttccagctttctctctccagatctcatctctctgctgagctccaggcttttactttcagctgcttgctagacttctccatgtgaatagccttcagttactttaagctgttatgcttgaattctacttatttttattagcaccatttgtacagatttgaaaccttaaagttatgtttgactcttcactctctttagctcagactttttattcctgtgtaatagctcctcttttccatgttcactgccactacccttttagtagctactgcctctgtctcaaatctcttaaatgcacagttgtcagaatgatcttcctaataatcaccatataattcaaaaatttccgtggcttgtcattgcttttagaatataatctccttagcctggtatagaagacccctatattctaaaactatttcacattcttttttttattttaagatttttatcatttattttttaatgtagagacaaggtctcgctctgttgcccaggctggtctagaactcttggcctcaagcgatcctcctacctcaatcccctaaggtgctgggattacaggtgtgagccaccgtgctggcctacttcacattctagctttagttcccacttactgttttcagtatctctatcttgggccaaattaaactggtttttctttcccaggtataattggagttgttctgcttctaggcttgattcattaattcaacaaatatttatttagcatcaaatattcaaatatttattaagcacctacatgccaggcattgttctaaacccttgagcaacatctgcaagcaaaatgacagaagtcgtctcaacccctgccttcttgcagggggaaggggttgaggggcagtaagtagaataaattagtgtattttttataatatattagaagatggtagatgctatgccaaaagactagagaagagcaaaagatgaagaagacggtggccatgaggggaggtggtcaggataggattcaacttctgctgtggtttattctttaggtgcacccttatttcttcttgtcaaatctgaatggatttagggacctctctggggtgacacttctgttgtgaggtcctcccctttgtctactgaggtcaacttcctctgaatatctatgactttcttattgttgttgaccttgcttattgataagtattgctttcttccttggttttcagttatttgttaatttatctttactttcctattaagctctgatatctttgaggaaagggttattacaccttagtatacctaatttttattgtttctttagggtagtaggtaaaagcattggctttagaggtggtctgcctggtttgcctcctggccccaccactccctagccacaagactggggcagcttatcaacccgtgcctcaggttcttctttatccttgagatttctttctaaaattgattgttttctgccttattttctatgtcactctcttgcttgctcttagtattattatactttggaatttgtatgtctatgtgttcgccttcctcccctgaatgtaaggtacaaaaaggcagaaaccctgttattagtccctagtatgccttcccacccattttgaataaatggatgtttgtatgagtaaaacgaaataatttcgaacaccttgtgtcttgtataaatatataaaatacacaaatataaaatgaaatgtgcagtgaacatttgtgaccattgaacttaggtcttttgttaacacgtcttagtaatgatgaggaagaatatcccttcttcatatggcttctactttgtgttatcccgggtagtccggctcttcacacttcatctgcttccttcctgtgtttcccttggaagtcatataggcattcgctcctttaatgtctttatctttatggttttagtagcattgatttttgtggggtataactagtaaatgattctaagatattttgagaatataaatgcaagaaaagtattttataataatggatgagaaaagagggaaggagaaagggtttccatactctttcattgaatttcagcccccgaatgtgtggtaattcctggaatgatggtagtcagtactgattcccaagcccatcgcctctgctgactggaagcacagaatgatgggcccatgctttcaagaatatgtgactgttcttgagggaacactaaaattaactcgtattctatctaaattcttataaccattaatactttatagccattaatctccatatgatttccctatgtaatcatgagtgcatgcttcaatacatttactcttgaaagactgacttgtaaaaatgtgaaaaaagaaccatagctcatcccagctaaagcaaaatggttcagttttaccatccttaaatttgatctatgtttacatctgtttacaaatctgagcattccctccccgcaactgacctaatgcttcagtgccctcttctaataaaaaaatcaatatacacatccagcactcatgagtaaccctataataataaaccagatctcatgcaattgaaaaaaataatttcaggaaaaaactcattaggattgtgaccaaccacagtctttcttgaaaataagtatcatgcagtttaggaatataataatccttttaatttgattatgctattttcttaagccttaatcttagttaaaaaaatgtctttattaaaatgatgtatttggtgttctttttcttcacacaattaatgatgcagttaatctaaggaatgttaaattaagttgttttaaaatctgatttagctcaattttataattctttttctgcctctttttttttcatgaacatttacaatataaatatttatgaaggagtacatgtgttctaaaccattggtttgtatcatataatacatgaaaatattacatagtaaaaagtgtatcttttaaaaaatatatctttgtttttctagaaatacaattgctctatttctatgttaactgttttgctttctatttcacaaatgttttacattaaaaaatctgctttaaaaatatgaatttttaaatacttttgtaaaatacatcaattacgtgaaacagcgaaagtacagtttatattctttttctaatccttgatggttgcactttgataaataaatagatcatctaagattcaataggccaattgcagcatataatagctattcagaggcaattaaactgccttttttcatgccggcgtgtgagccgccctttcacaaccttcaacttgattcgtggtgattcaaaattaacttaaaagtcttgtttgctgacagcttaaggcttaattgactgaaagccaaatagagtgtgttctgtattcagcactaaggctattgataaagccatgtgtaaattgtgcatggtgaaagacagcgattgggcctcctgttcttgtattagtccacaacttagcattgctgcacagtcagaattgctttgtcaagtcttttatcacaccaggttaactctctctggagttgttccagcagcagagcagtcgagtattgagcttctacaacactgtagggcctgctataattctgttacttatttgtggtttcatttttttttctttaatatagtattggcctttcatttctgaacaggattgttggtagcatatttcaagaacccactgattttctgtatttgtcactttaggagtgaacagcatgttaaggtttagcggttttgagaaatagtttaagaaaaataagtatcataatattgatctctgctcctatgaaaattaaatctcatgattttgaacacttaattaggttaaggaatgcatgcttaatagcctcgagtgtaatgtaactattacattccaataacaattagaccgttggactttttcagtacttttacacacagaaaaatttcagtgattcttgtacctatagataggtgcatttctttatataaattgatgtttaaggggtaaatgagatggattatttatatatgtaagtatattctataaaatttgttatgcctttttccaaataagcctaagtatacgtagtagatgaaaatttgcatataaatataaattaacgaagaaaaattcagaaacaaagctaaaataatttttagaactactttactatcgtccactattatgttgtatatcttggaagtctgcatactttattttttaatgtgaagattttgatctgatattgatttaataacttacaaatgtaaattcatcaagtaatgcattttgaagatatttacattatcaataatgtttatgttgtaattatagctttttgaattaacggtatatgaatagtatttaaaagtttgtgataaactctctcttgtgttttttatttatcttaattttatacagtcaactcttaaattcaacatagcatactcactacattttaagaaatttttcttatttatataacattacctatattaaagaaatatttgaaatgtgataaagcttaaattgcctgttttatatctttacatttcagtatagttgttttagtttttagaacctgcaaatgaaaaatataaaataaaaccctgtcttgataataattttgataatgaagtaacaatagtgaaaattttttaattatgtctttcaggttatatataatggcattgaaaatatagtctgcatcttaaacatttgcatgcagaagatgtacctttattttagtatcttttactttttattttagcataagacttggaattggatattgctatatctcttattgatattctggtaaccatggctatctaattttacctgccttccaattgatttccaataaaaacctagtctgttcataaagaatcaggataagttgcaacttagtttcaaaatgactataatttagaatagtgtgttactcctatatacttttcaataaaatagtaatcatgcttcaaaatgtaaaatccagaggagtaccagttttattgaagtttcacctatacccagtgagatttgagagtcaagaatgaattgcttttattgatcatgtttttgtattaacagttaatctaacatatctttaaaggcatgaattatttgaaaacaacattttgtttctttttcataacatagttgtttagtatatacaaaacaattgtagtgttagagaggacaaataaaatctcttttcttatttttacctttaaaaataaggctaaatttaattgtagggataataaatcaattttgttttaaattaaatagttgtaataataaagcaaaacatttctcaaaatttaggaaatatgttacaaatattgattctgtagtgagtaagagattagcaatatgaaattcttgttacagaatttgagagggataaaagcactttgccagcactgttttatagatgaagaaatgagaatttactgaggttttgaaggagtgtacctctacaagaaggggagagcacagtcaggttcagtggtactaattttataaattattatagattatatatttttgaaaaagtattacatttcctggcaaattattataattgtaaacttcatatttttatttattgcaaaagtacaaaattttgagattcagggcttttctaggaaagtaatttatatttacattattcttaactttggatattaaccttttctcttgttatctgcatattatacaagtattaatagatgacttttagctttactgtttttcttgaattttcccaaagaagtttgtccttttcacaatgactaaactggtactttgtttttagttagctgtttgatcagttctgtgtacctattgatgtaccttaacaagtgaaagtgaatggccattttatatctcgaaatgtattgaaagagttctaaaaatctcaatactgcatgtaaaagacaacttgacattaaaatgatctgtgatgagttttggttttatataatgttatcttctttaatttctgaggcttaaaatgttttataaattgaaatataatattgtgatactacatttaccaaactatccaagtaatattttacttgctcatatcttagcaattgaaattttatgttgtgctcttgagagaaaaaagaaaaagcatcaaatggacttatgataattagaatactagaacatttctaaatattacagtttatatttatacaatgtgtatttaaaaaacctaatagctaaaatatacttttatttgtttttagttacttaaatacttctgggaaaatatcaaatatcatctggttaaatgaaatgtttatataatgtcatgactctcacttagcttgaaatctgtattaaattgaaagtgatgttataaaactgtaaatgagatcataagtatctggccatatatttttgtttgagcttttaaaaatgaagaacaatttaatgtcttgcgaaaatgacattttcattaacattaacttgaaatggagaggattagtataatagcatacaaaaattaacttgttaccagtacagaaaaaattaccgtgaccatcaaatttatacatttgatctaataacattactaaataaagatcattctgtgttatgtatttaacctctcgggtaatagaagataaatatatcttaattttgtctctctacttcatgatatctaaaataatgcagggtccattatagtagatattcagcaattgagatgatcatatattgaaattgagatatgaatagcattgataaaggaagcattattttaaaatacattcaggatcaaagccaagattgcctcctgatgaattctctatcattattaacttaatttcatttgacatatatgtggtactgaataatatatgatactcaatgagaagaaagacactgggttttattttgatagattaaccaggaaagagttgattgtagctctgtgaggttatgccatgttatccaaacaagaccgatcattacattgatatcctttttactaatcatttgtatccaatgcactctaatccagcggtaaatatgtattaatattttgcagtcttttttgaaaaagtgatacatgtttaaaaagagtggttgaaacatctctaagtgctaataagtacttacttggtagtctatactaatgttgtagtggatgctgaacaagtttaggtgttaagctttttaggaagagtgaatgatggctaatgattatttaatgacatctctggactgaaaggcatttagcactcaaagtatactgcaaagcctatttctcaaagcttcagacaggtttatttggtctcaccttgaatacaacagtgctgtattgatttcattggtgtggatttaaacacactatcggcttagaatagcactagtatgcagtagaaaatgattgtcttaacccttatgttgattcttagctattgtttgatattacacagtaaacttcagaaatgattatgaatttatttgcagtattctgaggtgcagtatgtgacttttgaaaatatttgtacatgcatgtttatagtagacaacttacaggaaggtttatgtagagaaattaatgtttaattcatattttgaattagtgttattgaccatatattgtatttggagaaatttttcttctgtggaaatggttgatgtttctgtggaaggcatgctgattttattctgttaaatcatttaagtatttgatttctgtatggtaatgcattgatgctcagtactttgtttttggtatgtttcagtatttcatatttatctttcatataaaaacaatttaatgtagttcatatgcttgatagaatatctcttctggcattttctacattttttagatagctttgtactaaatatatataacattagataccatggtccaaaactttttttaagacttttttctaattataaattttgcttgcttattattttttaaggaacatttaaaactatacaagatttgaagatacataatagagattcatgttggcataggcatcaaatattaactaatttctatgcagtaaacactgagattgtaggtcagtgaagattctggtgatccatccagaatgatgttgccaggaatgcccactctgtttgtgcccttcaccttgtggcttgaacacttcacatacttaactttccttatctataaaatatctgttgttctgattaaaagagcagctctgtaatctccttttttctctaaaattttaaaattcagccagtcatcttaccttggacctaagagatgctttacacactcagcttccaatatgttttttgtttttttaaatcttaatagtttttctgtttttttttaatgaatctggaaagtgattgtagtaggcatataattatgtcattataacaaatacagtattaggaggtatatgaatcaccttaagtaaaaggtggacttcagtttttttgttgatgtttttaaaatggaggaactttttatctttaacatatttcgaaagattttttttctatgagtaaatactatttcttattgagtattttttagaaatcaaaaacattggattaagtattagataaattattttttcttttgctaataggagaaattatgtttcagagaaatgataagcacatattaaattcttgctttggattgcttttgtctgtgttcagctcttatatggcaaaatattcgtgacactgacactggtgattttatggcagtggtggtaggagttttcagtaaagtttatctcctcttgactttatgttcctttttttgtcctgccagagagtctcagagcctattgtatattttgaaataactggaagagaagaatctgagcatttctagcataaagaaaagacaaatatttaaggtgatgaatatcccagttacactcatttgatctttacaaattacatgaatgtattaaattaccacatataccctgaaaatatgtacatctattatgcaacaactttatttacttacttatttatttatttatttatttatttatttttgaggcagggtctcactctgttgcccaggctggagtgcagtggcacaataacagctcactgcaacctccgccccctgggctcaagcgattctcccatctcagcctcctgagcagctgagactgcaggcactcaccaccacacctggctaattttttttatttcttttgtatttttagtagaaatgtggtttcaccatgttgcctaggctggtctcgaactcctgagctcaagccatctgcctgccttggcctcctaaagtgctgggattacaggcatgagtcagcacgcccagcataaaatttttttaaaaatctcagagcagtttaagtacaataatagccatcttgaggatgtatgtttaccaaacatcaatacatatatattttccaggtttttacatatgctgttatctctgtcttaataaaagactagagattagaaagccgtctcttcacaattccagagtaacctaatgattcaaatcattgggagggagatagatagggaggattttgaggaaacgattatgttgtatcatagcagaaacagatttgttttaaaattagttttggaaaaatggcatgacatcttataaacctgagtatctgactacatacatatctaggcaaacattaaacttttcccctactgtttatttcaggagtagtagcatttccaaatccatagttgtaatacatgaatgagttagatattcagtatctctaggcatatgtgctaagttaaacattggaataattgtgcaaaaaattcaaggactgaaagctgtttcagtctgatatttgcaacagaggcaactcagagccaaattcgaaatgaaattaactagataataggaaatcctataaagtagttacaggaaagagaatattagtacatttttatatctctatatgctcatttgaaaaggtatatagtaaaagaaattatgtatatagaaaaaggtctatgaaaaaaatttgccaaataacaactaggtaccacaaaggtgtgggcattaatttccaagatactatgttgcccctaactatgctcctttatttctacttaacatctcacttacagtaaagaaagcagaagaaaaaataacgtaaaataaggtgatcatttttcaaagctagagatcctttagaggttctaatttactccaaacgaacctttaaaaaatggtcacttttagtcacatgtcattgttttattattgcgatataatttaaaaaaatgaatactacagatactccttataaatgaacagatgtacttgttaatggctcagaagtagagcaaggcctttttcatctcagttttatatcactgagttggtaatgacccaggtgaaaatatgttttaagtgaatccagtaaatgatttgtcattttataaataaaaatgaccttaggtttatttatttcttactatgctgaaatgcacagatataaaatcttcataggaggtattctaccagtccaccaaatgttgtctcatgttttctatttgatcttttacagaaacgtaccatgtctaccccgctatttttataagtaaatctcattgccagagtttctttttctaagtagtaactgtatgagaaaatatctgagaatgatatgctgtgttttcagatttgtataattttacaagtcactacccactgtgtttctgaaatattccttttctcatggaaatgcgaataatggtctcagtgttacaatttgtagtttcttaaatttgccatgtgtatcagattcacctttgaaaggtcaattgaagcaaaaaagttagacgtttttggagatagtttttacctataagacttctgattacttagctgccttagatacttgggattactaaaatctcaatttcctttcaaactgagaatgtttgccctaatagtaaaggcaaagaaaaaaattaacttgttattcaggtagagaataaagggaaatataagatgatgcagatggtaggaaaataggtataggacaggatctttgtgaaaaataagaaattgtttcatgaattacttgaaaaacatgtgaattgccctcaaagcttaagatttataattatcaaaataattgacacaccttcagaggagtgattatttctttgaaaaagaaaatcattttagagtggtcatatattttgcatttatctgatttaatggaaaatagctttgtctattttgtcaactgcacacacatgtaatacatgtgtatacaagaggcattatttcagaatggcttaatcagcagctgcagaaagaaatatgcatttgcagaacctattgtgttccagcagggggctatcgtgcatacatacaaattaatagcatgtttgtttacttcagttttcaagtgagtggggaagtaacacagcagcaacaccagcagcaaaagcctcttagatttggggagcaaattccatatgttctgtcagtagatgtgaggaaaacattggcagatgtgtcacaaagtaactcaaatatgtgtttaatacagtgggggaaaatctatgccgctaacacaagattagctatacacacagtagctttgataataatgtgaaaatttgaaagtaaatgtggaagtgccctatgacagccatttttaatcagttcattttcttgataggaggcaaagaagaagacacagaaaacttaaaaactttattttatttactttaggtgcacaggttgaaatttacatgttggccatacaaccatgtacaattttatttttttgtatcactaaaatttatttgacatattttgtagaaattgcagagctctaagttatgccaacaaatgaaaataatatataatattcatataaacacatttggtttaggaaaagaacttaattacatacatttacaatggcatggatccacaacatacatcctccacatgagcctatgaaacctggattcaccaccaggacagcgagatcttgggtcctttctcccaagctggattatcaccaatctatgtctttgtgtgttcccatttaacaaatttagctttgaagtatttgacttcaaagacttggggtacattggatgacttatgtagcattttaagttcttttaaagccaaagtgttttaaaaatgaatattaacagatttttgtttgtttttaagatttttttcctattgttagcaagctattttgaaagactattgttatatatctgataaaatttgacatttttatggtattgtactttatccctactttaagcaaccctaagaataacaagtaggtatggaaaatgtttgagccatacatatatggaaacaacttatttacactgtgaaaactccactgagggccaacatttttctcattataattctaaaacatgttttaaaaaaatctcaaaagtgtagttctagcttgcttaggtatcatgtcttggtaccttcactaagaatgctatatacttatgtgtagatgtataattatgtacatgcaatgtatttatgtatgtaaatatagaattaacatatttgattaccagcatacaatgataattaaaaagatagatcttaaaaattgttaatattccattaggcagccaggtgtatcaattaattaattaatttagagatggggtcttgctctgttgcccaggttgaccttgaactcctgggctgaagcaatcttcctgcctcagcttccaaagtactggaattagaggtgtgagccaccatgcccagcctcaatttggatagtagtcaggagaaaggtaaagttattttgattaaagtacatctaaagacaatttgaatgtaactcacttttgaagatctagtttgaaatatattttgattggacacatttcactatcatgtattgttttaaactcaatacagtatacagttttatatatgctttttatagtcagtgtgtgctgataatgccatatcacatttaaaatatccttgggactgagaaaatagaaataaaatgaaaattttagaagaatattttactggtctgaaaatagaaatcttttgcagctttattgactaacatttgtagggctctgaatgatgtgctcagactatttattttgactatatgcagacattgtacatagtaaatcgtgtcttaagtctgaaagttcgcttgttctccagaatgtcagtattaacaaagttcactttgctaagtttgctcttgctctttaataattaatcaaaatctaatattagcaaatacactttattacaaataaaacaaggctctaaaaaaccataatagaaagtattttctagcttaatccaaattattttagtctctacatgttgccatttagttttctgctgtgagatcttacagctcactgtttttctagtcatttatgtaaagtcttacaaagtcacggttatttttaaaactatgtcttattaaatgcaaattgtatttttcactttggaggcagcaaatagtaaaaccaaattatctttgtacacgtatgattctcaaacatattattaaatatttaaaagtaaagaaacacttttattgtttatttttatttatcatgaaccaatagacatttctgacctttcaaaaggtttttagggtatattgcaatttatactaaatttagacaatatttgtatcattgtgaatttcgtttggactccatcttgtgccagaaatttctggcataaaattgttatgttaacacaaatcttaatataatgtgttgggttaaaaaaatcctaatgacatgtttattttatagtttatgttttcaatatggttattatcttgacgggagttctgactgaattcaaccgcattattttaatttttactagaaatttacttatatatgtcagctgtaacaagtattatgacactcatttctaaataaagaattgaatgtttaagaacagttttttcaggtcaaagcacagttctgaaagtattctcggagtagtaaattggtggtatctacttatctaaggttttaatacctaatgcaataataaagccccatcaatatatggctcaatagcacatataaagtatctgctagtagtccatctctcataaaaccgcctttagccttaattcaaatccattgattcctattccagttaaaactgaagaacttaatatgtcttttaatccttttattgtaagccaggataaaattaattttaccctagcactgcacaaagccaattaacatgatctttagagttatttagtaaagtgcttcaaactgttaaatttatcttgacctcttggttgcactctctgactgctttttaaatgaagtaatcaatacctcatagccctttaaatagcttaaacttctcaaatattttacctgtattctagttaagctgtaagtaaagtgtttactccagtttgtgtaaatctagagtcaattatgctaaatctgaagacaattacgtacatttgaagaacactctgtcaagtaaattgttgttttaatcaaaattaaagcctcatattttgttataagtaacccaataatgagaccacgtatcattttcacacagaacatgtattctgtttgcaacttaaaatgtagaacattaatgtcctttaccatcgcatatagcttctcttttccacacagggctagttgaaggtattaattttcttactgtgatagggtgatcaaccgtcctgtcaagaaaatggatctccatgtcaccccttagcatgattaaatggaggcatgtctctggaaaaaaaataccaaattttcatgagacaaatgaaactgtagaaaggtttacttttacagaattattttatttttaatatctcaaaatcttccatttggttgtcattttatttgtaggaaaacattgcaactagttacatatttcttctgttaacagaaagtacaggcaagccaataatttaaagatatttccaaatttgaaaaattataggaatgagaaattgctgtgttatttttagaacagtagcaggatgggcatctctcccttatagaaacactaatcagtcagtgtctcctttagggactcctttccttgttcttttttacctctttccttgttaatgaagggctatcatctttttagatttgaatactgataaaaattacatactgtagaatttcagcatcagtagtgttaattgccagttgggcggtgttcttatgagcctatgtacatgccaacctttaaactacaccaagtgatgtacttgacagctaattaagatttcatattttggccacttagcagagggtacctgttacaattctttccattagcttagggataaaatttacaaatgattgtttgaaagtacactgttaaaacttccctaaagtcttaattccttcccctggagtgggagttaagacaaaattgaggcaattaaacaaaaggaacataaagaaggtgggggaccagggatggaggcggagctcaccaaatgcccctgttgtttaatttcctactggaagcagcccatatgtgcttctgtgccccctcccgcttcaagcagtggccattgcagaggctgaacggctggggtcaatgccttgcctattgatcagtatccctgcagtcccgtgctccagcagctgcttcattggcttctttcagggcctgcttcagtacattagaatagaaatccataaccagagctgtgctcatccaagcaggggaagaaactaaattaaatggtataaaacaatcttgaatcaggagtttgtgccaattcatcttgatctaagatgtcacaccaggctctctgtctgagcacctgggctagaggcagccatagtgaaaatagatggagctgcgatcattcatttgtcagctaaggagcaaggcagcggttagcaattcccttctgcagaggtcagctgacagaacaatcagtgcaactgcagaatagagctttcctttgaactattgttatggagcatgctcttgctgagacatgggggaggggagcttggtttgcttcctgtttcaagaatactatgtaaagagtaaaatatatagtatgtgaatctagatgctgtgccacagagcttttcctccttgtgcctgttcttatacataaacaaagttggttttaaatgcatatcctgagatacagattatcaaaatgttaaatatcactttttctagaattaaggttcttctaaacacagaggcaatgattattgatttttttttcttcttagtatggttacgcatttaggtggtttttttccccctttagttaccatagctatcacagattggtgtcacactttgaatctgtaatagcatatacctgctaatactttttactgacatttcctctctgtctttaaaaaactaaaactttccatgaagagagagaaatgcatactttggtatcagactagaagatattttaattattaatttaaaatattttataagaaatataattcacaaaatatgatttatcatgacaaaataatttgtaacattggaggggcatcattattaatcaacctgcatgtgatctgaaatatcctatacaaaattcaacaaattaagaaaatgtttcataactaaacttttacgtgagcaattagaatagttttaaagataaatctattatctgtggactccttttcgatttttcctttctgtacactacctaaaagtgaatggcaaacatccagaactaactttaaaaaaagaaaaagaataaagtgtgatgtgcggaagctaagaaaccataacagcaacaagaagaaatcttttttatactcataattgcaccaaacattttaggaatccaagtaagtaatactctggtgttaccatcttagttttctagataaccaatcctcctttttcccttacatacgttaagccactttctcactcagttctttttaaattattagattctttataatatcctataatttccatttcttagactcaactaggtcttcttgccaacatccagatttttttgtgcctttcagcacagctaaacaatggaatttaaagtgtatactataaagtcgtgtcctccagaagttttttaaagtcagcttctggaaaggctgtatctacttttgttaccagggttgttttgttctgttttgttttcatcagtaatttttaaaagaacttaggatatgatatctcaaatctttctgccatatttccatcttctcagacctcatcgtgtattgtaaagctctccacttcccgtgtcttctgtttaacatcacaaaaccaaatccactgtaatctctcatcttgatttctacagtacccctcaagtgatcaccccacttctaatattctttatactatgcttacagtggatttttgaaaccctaaatctaattaagctattctgtagtttaaaacccatcttgcataccttcccactgtttgtgggatataaattggaatgtgcatatgacctacagaatcatatatgatctggccctttcctgcctctcctgcttcattttctgcagttctcctctagagttatagagttccagccaacttagctgtccttgaaatagaaatccacagactccttcatgctttaagttcttaaacatactgttttttcgatccagaaagttctcattgattctgtaacttacacatttccaatgcctgtttagtagcccttaagttcaatgagggcagggctttacttaactgtattaatttttatctagcataatccaggcatacacaagacctgcaattcttacatgttgaataactgagttcagtaatggatggaatgaactgccaccaccactggttcttattgttgttcacctgatcattgtgtgagtcttcttttggttttccttgacaccagtcttgtttgacctcacaattcatccaccatactgccactaccatgatctaacagtgaatgaatctaacatcaccaccttatacagaactatttaatggctttcaattagccataggttagaagtcttcagcttgccatatgaggcctctcatggtttggcacctctttagtttgccttacctccagtaatacagaatgacaaagtaaaacaaatagataaaataaaacaaaataccaaaaaatattcagagagccttgctgctaatttctcggttggcataccgagctttgagtgacctttgttatactcatttaatcaacatatagcgcaaagaactgaaagcggccagaaaaactgggtggattagtattagaaagagcagaaagctgacctccaatcaagatggctccgggagttcacttttttaatccttctgtgccaaatacattgctatgatggataaagtatacaaagagaaaaccaaagagacataactaggctcaaaaaagatatctctgtggaccagtaatgaaatagaaatgtaatgatctgggctgaaaccattagctactttccagaagcaggcttttggctcctatgagctaaagaggacttacaatacatcatgaataaagtttaaagccaggagctaggctatagcttcctcagttcctgaaaggacattgaaaagatctgagtgcattgctactcagaaaaaaattgataaaaaagaagaggaaaatgcatgtattaaatacgtgactggcaatgttaaccataatgtaaaatagtggaaataagtgagttctattcaacacaagaaactagaagcaaaacagaagaaagagataatctaaagacagtagaaggagaaataataaaaataagagcagaaattaataagatagaaaacaatgatacaaaagatcaaaaccaaagtactttttaaaactaatttggggctgggcacagtggttcatgcctgtaattcctgcgctttgggaggcgaaggcaggaagatcacttgtggccaggagtacaagaccaccttgggaaacatagtgaaaccctgtctctacaaaaataaaaataaaaaccaaaacaaaaataatctgataaaacatatatttccagcaaaactttaagaaaagcatgaaaaataatattagagaaggtataaatacacagtgtttaagggatccatatctgctgatatacttgagtttttttaatcatatagagaatactgtaaataattccataccaataaatttgaaaatgtagatgaaatagataattcttttaaaattataatctgccagaaatgactcaagaagaagaaagtcaaactaaataaggagctatttataataaatattccttccttcatcctgctacttttgccaccatatcctaccctctgactccacacagggagtgtctcgaaatgcagacttaatagttttagaggagaactttcatgaaacttcaagaatccttcaactgttttcaaggaatgatggaagggggacctcagggactgagagtgaacgttacttaactcatttctgaggctcgtattatgttgatactaagtatagaatatgaaaagaaaagtatagaccagtctcacttatggacatggatataaaaaagcctattagcaaatttagttcagggtctgtctgttggtgtgtttatctgttggtgttatctatctgtcactgcttatccatgcatacgtttgtttatccagggtttaccccagatatggaagcatagttcaaggccagaaaatatattaatttatttcaggtaacattgatataattatataatagatataaaatttgataaggtcagaattgtggtgacctttagggcaggagggcaaggcagtgaggtcaagacacagtccatggtgggctttgataatacccagattaattactttataaaaattggaaacctttggaaaaacatcagtattttataaggttcattagttgtgtacatgttagtcatgatttctttatatattttctactaattctgtggatgcttataatattgcataataaatatcaaaaaataatggtagactatttttagaatggagtagaactaaaaaagggtagaactatgtaagtcttaaaagaatgtagcaagagtgaggttaagaaaggaaattttaagaagtaacattcctattatgccctatttattggtattctaatcaagatataaaattgttttaattatttttgggtatccttctaatctttcttctgaatatgaaactatgctgagctttgctccagtaacaagtatttcttcaaatatctgattgctgttttgcattctgtgccatactggatgaaataatcatccttctcctcctcgtatggcccatccctcttattgcctggaaaacttaccctttgagtcttaaatccaatgtgctctctttttttcatgcacttgtgagattcttagaaacctgagctgtttattttcatgcttgttattttctgatccaaagtagatgcccaataaatatttgttaaattaatgggcacattaataaattactcaatgaacaatctttctaaaaaaacaaatgtactgagataagatgtatgttgtataaaattcatccttttaaaatgtggaattcagtgattcttagcatatttggggttgtgcagatattacctcaatctaattttagaacattttcattactccctaaaactagtacttattagctattgttaaccattttacccccactccagccaaccactaatctgctttctgtctctatggatttgcctattctaaacatttcatataaatggaatcatacaatatatggtcttttgtgaccagcttcttccccttagcgtaatgttttcagcgtcatttttgtggcatgtatcattacttcattccttttttattgctgagtaatctaattttgtatggatatacttagatttgtacaaaagtaatcgctatttttgccactgaaagtaatggcaaatactgcgattacttttgcaccaacctaatacattttctttattcttcagttgatggacatttcagttgtttccaaggctattttgaataatgctgctgtgagcatccatgtctttgtgtgtacatgtgtgtcatttctgtttgggagatacgttggagtggagttgctgggccacatggtaaccctatgtctaacttgttgaggaactgccaagctgttttccaaagtagttgtgccatttttatcatgcccaacaacaaagcatgagggtttccatttctgtgcatcctcaacagcactgtaatggtcttttttattgcagccattctcatggatgtgaagtggtatctcattgtggttttgctttgcattttcctcatgactaatgatgtttagcatcttttcatgtgcgtgttgaccattcatacaactttggaaaaatatctattcagattgttcttattattgagtcatgaaagtttttatatattctggaaataatttttattagataggtgatttgacaatagtttctctgattctgtgggttgtctttatcctttcttgattctgtcttttcaagcacaaaagtttttagtattgatgaaatcctatgtaaaatttttaaaaaattactggtgcttttggtatcatatctaagaaatcattatataatccagaattacaaacatatacacctatgttgccttcttagagttgttttttgttttagctgttatatttaggattatgatcaattttcaggtttttttttggaaggttagagataggggtctgtctaaattcatccttttgcctgtgagtaaccatttgtcctagtgccatttgctgaaaatgctattctttccgaacgtgcagtcctgaatgtttttctaatcatgtgtctttttgtatattgatttgttctaagttgagattctatgttttggtcttcaggttgcttatcaagtgtcccacaaatgaaaaaaatttctacatcttacgaggaaagacggaagcaagctaccgctattgttttacttggagtaataggagctgaatttggtgctgaaattgaacctcctaaactattgaccagacctcgaagctctagccaaattcctgagggattcgggttgactagtggtggatccaactactcgctggccagacatacttgtaagttttaaaacttctaatgctgatctgttgcttctgaatacatattatttgtcagcaaaatctcataacattgactatatcctgagttttagctcatttagattgcttgcgtgaagttagaaagcagtacaatctggcacatttcccgttagttacagtaacctgaactcctttttaaaagttaaaacatcgtcttttaaatgctattcttaaaataacacatttctgacctttgtatttttgcattgttcgtcaagattttagccagaatttatgaaagctagattcaagttaaagcttttaaaataatttctggaaaactatgcagtttgttctgaatgtggtttgaaaagtcaggactggggtggaacaccagtcttttcttttgaaaagaaaatatattcattctcctttcaataaataaattctcaacacatatttgttaaattaatgggcatattaataaatttgtatatgtgataatacatataaataatacatgggtttatgaaaaagagcatacatgatgaattatgaattaaccctgtaatttaaaaaatattccagtaacagtttttaaatgactatagactataacaatcaaaattcaaagggctgtgtcattctactctctttggttctgtgcttggtatgttaataataggtaagggtgctttaaaataagctcttttggttcttcagtgtcagaattcctttcagtaaggtcagagtggcatgtggcaccatatagcaaaattatttctaataaattgtgtcctcttaaggaacaaatatagtccaactgaatacatcacaaaatattcttgtagaacaaaatgcaatagatccttttgcttttttggcctttaagcaagagaaaaagatgcatgttactttgttatttatgacagcagtgaacttcactggaccattgccacatactcttgctgtaaaactgagggccatgttagtgacttttattataaaagcccttcaatagacttagctgcccctcctataactgttttttgaaagacttcattcaacaaatacttattagtgataatctcttgatctcagtttgagaatcagagtaataacgtttaaatttaaacaataccaccaccaaccataatgatgcaactattatgagcactatttttttttagctctttacatgcattacctcacttcatcctcataataaccctgtaaagtggatccctcttatctcgattttatgcataaagctggtggggcatagagaggtttagttaacctggcaaggatcatacctctgggaaaggagtttttgtttccatctagtctgttgttccagagttcatgcttttgaccattatgcaaactgctgctattcagtggctcccagttggaaagggcttaatgactaatatgtgctgtaactttacaatttattgatttattttattttattttttgagacagagtctctctctgtcacccaggctggagtgcagtggcatgatcttggttcactgcaacctcctgcctcagcctcccaagtagccaggattacaggtgtaggccacgatgactgggtaatttttgtatttttcatagagacggggtttccccatgttggccaggctggcctcaaactcctgaccagaaaggatccacccacctcagcctcccaaagtgctaggattacaggcatgagccactgcacctggctataactttacaatttaaaaaacactttctttcctgtctttcccctcatttgatcttcaaaatgaacttaagacttcttcaaagtgactcagccaaaaagtagtaaaacctaaacttgaactcaagtgtcttgcgacctgagaaccgtttcccttctccacctgggcacattactctccctctacggccaacaactacatgcttactggctcctacctccccactcgggcttatttatcttttctcaagttcttcaagatccctgctatccattcctaaaaccttgcttaaatctcaccatttctacaaagggctctttaattagtctagcttatctgtcacttcagacagcccaggacttaacatatgtagagcaggtccttatttagaagtttggcattagactattagaggttaatgaagctttgacatgatttggtgtggtggctttcaaacttttttgctcaataactccctgagagtgtcaagaaatgtctaatcctttgcacattttatgttgacagctacaactttttaattgcaaaatatattttcacagtatcttgaggagattgtgaatattgatgtttaaaaataaaacttatggctctttctaatatattcagtagaatatttaactatttcatatccatcatcatcaatttttaataaatacctgaacaaacttcccattaaaaatcagaaatcttaaatcctttattattttctttgaagtggaaatttctaccctcacagttttagggaaggagttcattagcaaatttagcacccagaaatcaattcctttaaaatacctaggtcttaaactgtttgtgcttctaaaactacctattccttgaaacttttaatatactcctgtttgaagagggttacctattttgaagaccactgattaagtctaacatattttgtgtaatttctcaacaccatccttttgtatttgatattttcctgcaaggagagtgaaaataaatgctgtttcatttagaatttttccattgcttagtacaaatatctgtatataaatgtaggaacggctgggcgcggtggctcacacctgtaatcccagcactttgggaggccgaggtgggtggatcgggaggtcaggagattgagaccacagtgaaaccccatctctactaaaaatacaaaaaattggccagatgcggtggcaggcgcctgtagtcccagctgctcgggaggctgaggcaggagaatggcgtgaacctgggaggtggagcttgcagtgagccgaggtggcgccactgccctccagcctgggcgacagagcgagactccgtctcaaaaaaaaaaaaaaaaaaaaagcaggaaggtggtaaataaatgaattgctgattggttgcattcaggctctgggctggatgctgggtaggttagtttacatctcattatcctagttatgtaagagagtactgttgtcatcacttttctaatcacagtttatctttacacaaaattgtgttatttgtgaattagcttctatatgacttttcttttaactgtaataattttattttttaaatttttatctgtttacagtttttttaaaagtccatttaatctctcagtcttgtttttttgttttttttttttaaatttcaataggttttggaggagcaagtgttgtttggttacatgaataagtcctttagtcgtgatttctgagattttggttcacccatcaccctaccagtgcacactgtacccagtgtgcaatcttttatccctcacccctctcccaccctttcccctgaatcctgaatgtccattgtatcattcttatgcttttgagacatcatagcttagttcccacgtatgagtgagaacatacgatgtttggttttctattcctgagttacttcacttagaataatggtctccagttccatccagatttctgtaaatgccaatatttcattcctttttatggctgagtagtactccatggtgtgtatatataccacaatttctttatccagtcattgattgatgggcatttcggctgattccatatttttgcaattgctaattgtgctgctataaatatgggtgtgcaagtatcttattcatataatgacttgttttcctctgggtagataccctatattgggattgctggattaagtggtagttctactcttagttttttaaggaatcttcacactgttttgcatagtggttgtactagtttacattcccaacaatggtgtaaaagcgttcccttttcataacatccacgacaacatctattattttttgatcatggccattcttgcaggagcaaggtggtgtcgcattgtggttttgatttgcctttccctgataattagcgatgttgaccatttttttcatatgtttgttggccatttgtatatctccttttgaaaattgtctattcatgtccttagccagtcttttgatgggattgtttgttcttactgatttgtttgagttccttgtagtttctggatatttgtcctttgtcagatgtgtagattgtgaagattttctcccactttgtgggttgtctgtttactctgctggtggtttcttttgctgtgtagaagctttttcatttaattaactcccatctatttatctttgtttttgttgcatttgcttttgggttcttggtcatgaagtctttccctaagccaatgtctagaagggcctgagaaccacactcccatcccccaccacggctgcagcaagccaggcccaaaaagagtctgagctcagacatgcctaaccctgccccaacctgatggtctttctctacctgccctgatagcaaagacaaaggacataaacacttgggagctctagggccctacccaccacctgatcctccctatactaccacagctgatgctttcttgaaagcaccacctcctggctggaagccaaccaacacaaaactggtgcaataaaactacaactaaggatgctcacagagtctatttcactccctggccacctccactggagtgggtgctggtatccatggctgagagacctgaagacggttcacatcacaggtctctgtgcagaatgcctcagtcccagcccagagcccggtagctctgctggctgtctagacccagaagacaaataaccattacagtttggctctcaggaagccacatccacagtggaagggggagagcagtacatcaagggagcaccccatgggacaaaagaatctgaacagcagccttgagccccagatctctttgacatagcctatccaaatgagaaggaaccagaaaaacaattctggtaatatgacaaaacaaggttttgtaatacctccaaaagatcatactagctcaccagcaatggatccaaaccaagaataaatttctgaattgccagaaaaagaattcagaaggtcaattattaagctaatcaaggaggcaccagagaaaggtgaagttcaacttaatgaaatcaaaaaaattatataagatatgaagggaaaaatcttcagtgaaacagatagcacaaataaacaatcacaacttctggaatgaaggacatgcttagagaaatgtgaaatacactggaaagtctcagcaatagaatcgaacaagcagaagaaagaacttcagaactcagctgggcgcggtggctcatgcctgtaatcccagcactttgggaggcccaggcgggcggatcacgaggtcagatcaagaccatcctagctaacacggtgaaaccctgtctctactaaaaaaaaaaatacagaaaattagccaggcatggtgacgggcacctgtagtcccagctactcgggagactgaggcaggagaatggcatgaacccaggaggcggagttcgcagtgagccgagatcacgccactgcactccagcctaggcgacagagcgagactctgtctcaaaaaaaaaaaaaaacaaaaaacttcagaactcgaacacaaggtttttgaattaacccaatccaacaaagacaaaataattttaaaagaatttttaaaaatgaacaaagcctccaagaagtttggcattttgttaaatgacctgagacctaaatgacctctcctgtttaaacctaagaataattggtgttcctgagaaagaaggggaatctaaaagtttggaaaacatatttgagggaataatcgaggaaaacatttgcacccttgctagagatctagacatccaaatacaagaagctcaacacctgagaaatttatcacaaaaagatcatgacctaggcacatagtcatcaggttatctaaagtcgagatgaaggaaagattcttaagagctgtgaggcaaaagcaccaggtaacctataaaggaaaacctatcagattaacagcagatttctcagcagaagccctaaaaaccagaagggattgaggccctacctttagcttccttagccaaaacaattatcagccaagaattttgtatccagcaaaactaagtaagatccataaatgaaggaaagataaagtctttttcagacaaacaaatgctaagagaatttgcctctaccaagccagcactacaggaactgctaaaaggtctaaatcttgaaacaaatccttgaaatacaccaaaatagaacctcctgaaaacataaatctcacaggacctacaaaacaaaaataaataaaaaggtattcaggcaacaaatagcacaatgaatagaataatacctcatatctcagtactaacattgaatgtaaatggcctaaatgctccacttaaaagatacagaatggcagaatggataagaattcaccaaccaagtttctgctgtcttcaagacactcacctaacacataaggactcatgtaaacttaagctaaagcggatatctttttctacaaaagatattccatgcaaatggacatcaaaaataagcagaaatagctattcttatatcagacaaattttaaagcaacagcagaaagacaaagagggacattatctaatgataaaaggacttgcccaacaggaaaatatcacaattttaaatatatatacacctaacactggagctcccaaatttataaaacaattactactagaactaagaaatgagatagcaacacaataataatgggggacttcagtactccactaactgtgataattttatttgaaaattgttactactatcactagaaaaagaggaaagaattaggggaaaaaagggatttgaaaagctgtggcagagtagaaacatatttttcaaagaaatcttgggaactgaagggccttaggactgctcatttggattgttaaaagacaggaagttgaactatatggaaaggggttctggagtgtatttctggcatgagctcaacctgggctgaacggcactatggggagggacttttgcatgatttctcctcaactttcccaatgaagataaataaaatttatgcaaacattttaaatatttaagtgttttagaacctggcctgttctttgagcattttgaataaaggactagatatgggaagggaagactgcaatgcttcttagtaaattctatttatgagcgattttgggaagtttctagcaggcaaggaatagtgtatcagaatgaatgatatagtacctcatagaaacaatttaaaatgtgtagaatgtccttgatattttttttcctttcttgttcttagcctattttattttaactgctataaaaatattttaaaggtaaacatggatttgcttttaacttttatcccattaacctatttttttttttcctcagaggtcttaagttccttgatggtaattttgccaaccacagggattttcaagacctttcttatttgaattgggatgtcttaattaaatttaaatttatcagtttaaatcttgctctcctgtttgaaaacaattagatgtctaaatgaccctctgtcttacgtgtactctttttgatcagtcatgtgtaatattaacctattataatgttaacctgctggaagctgttacatgtattgtcatgtttgtttatgtggcatttagaatgcattgctaccattaaatatttactctttatggcatcctattgaatgagagaataattattatcctcattttgagataaggccattaagatacaatatttaatgaactttaattgctaatgtagttagaggcatagatagtgagttctaaccttcctcctgaagcattctgtgaaaacccataatgtagtgaaaccccagttatccacattgatgggaggaaggaatgacactgatgcgtaattcaaaagccatacttagttttgtaacgtatcttatacttttttgaacatagatgaatcttttatgggagttacactttacatatattgaaatcacatgtcaaagacgaagctgaaggactctgaagattaatgagaagcctagattaggctagtgttacgttgtgcccttgggtaagctatgtatccctctgggttgcagaattctcttgcataaaataaaaggcaggagctattctgactttaaaacttcttttggtccaaatagtcttctgctcctgaagggaaatacaaagcatttcaggaaattcatctccttcatcaccttccgattttcttctccatgcagggatggctgctgtcttgttttatatcagcacacttcagtggagatccttctgcatttttattccaacccacaaatgaggcattattagaatgttttaaggtattatttatgacattaccttataggtcttttggttcattctttcattgggtctcttctgctcattttataattgtggaattatgctggcacatctgtagtaaattccattttgctctctcattagctttttgactttgggcaagtgtcgtaagtcatttcccgaggcagcagactccgaggcagatttgtgtgcaggggtattcttaggatcaatgtctatcttaaggggagtgaaacaggattaggcagagggggaagttgaattgtgttttagttacatagaaggcctcagttgatttgggggaactctggagctgggatgacccttcagacttgtcctgaattagggatcagggctcaactttaatatccccttgtcagtcagtcattggattggaaaagggttgggaggcctaggaaggggatgtaactttggataaggcagctttccttatcctagggcaaagcccacagagggattccactgagacttgtcagccacagacacaagaacttagggaagtggggacttcagtcatgatggggaggagatgggcaaccttgccagcttcctctgcagcatgctactaaattacgtgtgtcccagttctctttctattttaacaaatggagagaggaagaaactgtcatttatttaacacctttttaattccaactccatacatatctcttgttaccctgaaagacatttttgtccaacacttagcacaatatgaggcatgttaataatagctgatcattgaccatttactgtttgccagacattttgctgtatacttgacgtgtattatttactctcttagtcctatcaaataagtaccattgctattctcatttatcagatgaagaaactgaagctttgcttagtaccactgaatatatttactaaagatttctaaaattggattaaactttgtgcagacaataaattgagggcataggttaaattttttaaaaagattacactgctaaaaagtacgaagcctggactgaaacacctgtgttctaactctaaagcagcatattttcaccattccacatatttttgtgtgttataaagaagattcagaactgctgctacagagaagagaggaggggatgccagcaagtaccaggtcacctgtgaatacggacatctattgaagctttcatttaggaatgtgctgttgctatggatatgcatagacataaaaaattcacatatctgggctttaggaatggctttctctttggtatgagatacactagagataattaattttttcccacagtgagtctttagaaatactacaatgctggccaaggtacatgatctacctgccattacatggaaaaagccacatttatgtgcatttgtggtttttgtttttgttgctgttttccctaggaaaaggatgcacagattccatgaagttctcaaaagaaggccattaaataaaaatggataagaaccactgcaggagtttgttgaaataattgcttacctgttattatgactttttaaaacaatatagttacagattagttcagccacaacactgcaccactaaatggaagcctcaattctgcctaagggatattgcaattctatgaacttgtatttcaatttttatattgttctggtgctgtttggtttttattttgttgtagtgtactttgtgaaaatgatcccccaagtactccctgtgctttttaatcatgcatattttatttaatgaataggttaatataggttgagattgattttataatgaatttatttcctagattttaagagaagaaagtgaagccaaatttcaaatgttttattagcaagcttacgacaatgccacagaattgcaattaataacaaaactagtggtagttgcaagttatgttaaaaagtagcaacaatgacaagccatttgcaaagataagcaatagcaaaagaacagatattcttaccattcacaaatagttatcagattgtgttgctgaaatgctgctgtggccatagagattgcatttctgtttgatttcctttgtgtttccaacctggccatcctggcacttggaatgaatctggccttcctatctggctccttactctcttctctgacttgtttgttctcagtgcactaactcagcgtcccatgttccttaccaccacctctcacttgtatttttatctttgaaaatcatcctggttgcagatgccactggacttacatcaccattacatctgtgtttagacagtgactcttcacttaagctatgtactcaaatcacttgcagaatgtttttaaaatgtgagtatctgagcatttaggtagtcttcctattcagaaagccaggggtgggattcaggcatctgtattctttttaaaacttcatatgtaattttgatgtgtagccagagtagagagacccagtagaatctagaatcttttacagttattttaaattgagtattttatggtagctgtagtcattaaactaccttaatgcacaaattataccttttctttacattttcaaatggaagagataacgggaactaatcagagtgaatacatgacatttatactactttcagaactaattctttaggtagttcagcctttttattgtgattttgttatttgggaaccagagcttggtttcgaatcttggtatcaccacatcacagctgtgtggccttgaatactttgtggctcgatttccttaactaagacacaggaatagtatataacagtagctcctacctcacagttattgtaaggattaagtaaatcaatgcatgaaaaaaatgcctgacatataagtacttataaatgttagtttctgttgttgttgttgttaaatgtgtttgtagaagaataaggaaaggaaatagctctttaaaatctgtatatagtttttaatcttcgtaagaaccctgtgaggtagatagtattatcaccattttgtatataagtgaactgatattcttaaaaaatcaagtaaattccttaaagttatctgtcctataaacactctgaatccagatgcatttttcccccaaagctcatgctgttcttttctgtaacatatactgattttcactgtttgtggtaaaatacattagttctcagaggatttgtgtaaaaatatacttttctttggccacattatcatacacattttatatgtttaaatataacactaaatatttttgtaattatttatgtttggatgaatttctgtatgtttattaccttatttctcatttcaaccacatcagcatactaagttcagattggatggaagttttggctactcattttgctcttacttgtaaataatatatgttgtataacagctttatcatttttaactgcgatctgacacttacattatagaccctgcctgtcttgatgatgtaatctcatcctacttctccaaaaataactttaatttgcaaccattttttgttaagccactacactaaggactttgaatttctcttccagaaaacaagtaattcacacaaagctatttctaaggccatttccatctgaaattatagacctctatgaaattaatgtgatgtattattttaactgtagagtgcttgtatttattttgccacttgaacttgcctatctcactttaattgttctataccagttgttctgtctgcttttatacattccagtagtccatagctatgctatgtgcttgaagctgagcatctttaaagtatttttctgctgtctgtcctttacataactcattttccacacatgttcagcttcatatacttgtgttatgttgaatataattgtactataggccacagatcagcaaaccataactgtatgtcaaacgtggccccattcccatttttttttgcaaataaagttttattggaacacagccatacccatgtgtttacgtattattaatggttgtttcatgctaaaacagcagagtcaagtagttgctatagaaatcgtatggcctgcaaagccagaaatattcactgtctggctttttacaaaaggaaaaagacaacagaaaactaccaatccctactgtacatcatttgaaaagtctgttaatggtcgtttcttgacatttaatatgcaaaagggctttgaggtgactttgatgaagaagatacttcagtagttaaatataacatccgtggtagtaacatttagatagttttagtttagtttagatgagattacatcatcaagacagggtctgtaatgcaagtagagatcacagttaaaaattataaagctgttatacaacatacaatatttataagtaaaagcaaaatgagaactgtacccttataggaatttaagtagtatgaaggctttataataattttttggtctagaatgtgatgcagcatggtacaagactctttctgccagccacctaaagtatatactggttactttgattcaatttttcattttagttcagtttttttgattctttgtcactagattgcctttgtagccaatttaataacgggtcacattgtttgctggtgactttttttttttctgcattaggacattgtggttcctaatttttaaataaacttggcctgtagttttctgacagtcctgcagagtgatggcttcatatttgtatgtcttaatatataagtgcatcaggatctctgtaattaaagtattgaagtttctataagttcaaacaattttttatcaagaaaggaccatgaacatctagtgttaatccctctaagaactgcagagcttttgatggttctcttaaaaagcctttcagtaagaggtatatagaaacattttgtgaacttgtttgtagaccacctgccatgtccttagaaaacacaatttttaagactttgttgaatggtagggagtccaagtctattttgtttctttgccctttagcctgtgtgtcaaacggtaggtgctcatggacttcttgttgctacccaattcaactggacactgccagacccaagtccactagaggactcgaatgtttgtgtgaaatcaataaatgtatggctctttccttatacctttggtttttaaattatattcttcaaaaccctggggttagatggagatggctcagtggctacctaggcccttcgcactacttcaagaacagcagaactgatttgtgcatgtgtgttttagaagttggtgtttgacatcacattgtatctgcaaaaataggggtagattcctaaaaaattgacaaaactttgaaaactagatgttatatagccttcaaaaactcaataatagtcaaaattcttggttttcccatctaaacctattctacttgtggccttccctgtctcagttgatgcttattcattttttccagtttcttaggttcatccctaattcctctttttctctgacataacacatctaatctatcaagtatatcttattgggtctacttgaaaatatatcccaaagtcagctatttctcaccacctttcctgttagcatcagggttgcctaccttcattcttacccgggttcctgcgaaggcttcctgcctcaccgtttttcccttccagcatagcagtcgtggtagtgattctttaagaacctaatgtggatcacatccatgtttggctcaaaattctgcaagggtctaaaagccagagtcctccccatgccctgaaaagcactatgtgaactcagttttctcctacttttcaccttgcttactccagtgccctggctgcttctcaggcatactagtcactccttctgctgggacactctttcccccagatacctgcttggttaactccttcacttctttcaagcagttgctcaattttcaacttctcaatgagacctatccagatcactctatttaatcctgcaaactgctgcctttcctcccccatatccagtcccttgtatattgttctatactttcttttttaaagtatttgttgccttccaacatcctatatataatttacctatttacagtagttattctaccaagtcatgaatctttgtctattttgttgagcaacgactgaagtaatgagtgaaaactaaagtgcttatacataaagcagcccttgtagtatcttacattttaactgaaactttctctttgattatgtaactgctgagattagtttgctaatctttttgaaagtgtattgtctgttaactggacactcatggtatgatatattgtccaatataaaaagtatacaagtagtcaaaggaaaaaatatatgattatttcaacagaagtaaaaaataaaaaagacatttttaaaattcagtatcttttccacataaggactcttaataaacaatgagtagaataactttcattagcatgatacagaatattaagctgaaactaaaagctacgtcatccttagtcggttcacattagatatattctaacaagtagcatgttaatggtattatttagcatggacattttagcaaatgtagcaaaataagagttataaatattgaacagcttgtaattgtatatttggaaaaccaaggatatccatatgtcaatcagcaagataaataatcaaaaatgagtaacttctgtctactagtgaacaaagtagaaaatgtaaaaaatcatcattttttgaaagacccttctaactagtaagaccataaaaaccgggaagtaaaatacaacaaaaaaaaatttttaaaggctacaggtaggcattttgtcataggaggaatgcagatgacaatacaatttcaacttacccaattaccaaaagcattaggggataggaaaaatttgctagatacacttggatttttttaaaaattttttttacagtgaatagatatttgtgtggttaaaataaattaaaatgatgctcaaatttaatagtaaaaaaaaaactcaacaattatggctacgaaatgaaattgcatagctaagaatacacttaagaaatacattttcctgttgtgattattacacattgtatgactgtatcaaaacatcacatgtacccctaaatatgtatatctaccatgtacccataaaaattaaaaattaaaaatgaagagaaaaaaagaattacagaatatactaccgagggaactaaaataatatttgagtaaatggtttgcatttcttggatgggtgattccatatggcaaatatctcagttgctctcaaattaatatacacattgtacacaatcacaatcaaaatctcatcattcttataataactaggccaaattattctaaaatgaatataccagagataaatggaatatatgatttattttgttttattcaataaacacatgtagtgctgacaatatactggttactattttgggcactttataaatattaactcatataatcctcattgtaacctttgaggtagataatagtaaatcaactagacaatattataaaatataaaataccaaagcattaacctaacaaaaaatatgtaagacttatagaaaaaaatttaaaatcttactgaaagagattttgaaacacctagagagatatacattttttgtgactaggagtactgaatattataaagatgtcaattttcataaacttattgatagattaataccattccaaactaaacaccagttgaatatttgtcatcgtttttgttattgaacttggcatgctgattctgaaatttatatgagagagcaatagactaagaaaagccatgacactcctaaagaagataaacaaggtggagggatttcccttaccttatgtcaaaagctgttctaaatttattgtaattattacattgttaccttggtgcaggagagaccagcagactcacagaacaaaataggcagcatagaaatcattcatacatgcataggaatttgattttatatagacctagcattgtagatcagtgaaataaaagattgcatttttaaataaatggtatatatactattagctaaccacaagaaaaaataatgaaattggatcacctaatgcctgtcattaccaaaaatcaattccatgtggatttacagacaaaacctttcaaaaattttgaaagatgatataggaaaatatgaccttggaatggggaaagatttcataaataggtgacagaatgccaaaccaagccactaagaagactgacaaattcaagtacattaaacttacaaacttttcttcatcaaaaatacttgaaagaaagtgaaaaataaaggtacaaagagaaacaaaaagtgattgtaacataggtcactgacaagagatggttaaatatctttatatttaaaaaataagaaaaagagaaatccgtagcagaaaatggataaaggttgaaaaagtatttctcagaaaggaaacaaggatggccagtacacttatgaaaagatgctaagccctattgtcaaggaaatgcaaattaaaagcacaatgtactataatattttaccttccagactgaaaacctaaagtccaacattatcaagttttgtggaggacttggaacaaccagaactcttttatacttattataagaatgtaaattggtttagtctctttggaaaacaattgagtatattatcttgtgagtccacccttttctatatttagagaaaccttttcacatgtaacccaggaaacatgtacaagcatgttcatagcaaacagtttgaaataacaaaaattggaatcagcgcatgtgcattaagtattggacaaatatactgagcaaaaaaagaatggaaaaagaatgaacttttatgaagttcaaaaccatgtaaaatgaaataatttattattagggatacaaacgtatgtagtaagaaaaatgaaagctagggaatgaaaccacacaactcagaacaatgattactctaaagggtgctaagaaagggggtgaattcaggtagaactacccaaggggcttcataaatattgtaagacattgatattttttatgttgtcacataaaaattatgcatctttacctttgtattgttgagccaaataaaagaagggcataaaaatgtgtacactttgattcagtcttgtagtaaatattatgattcaagtatctaaaatagcagtgaccaagattataaaaatgtttctctcagttacaattaaggaaaaagaaaagggtagaatgaatctcgaaatataattatgacctcatagtttagtatgcatgcatacagatatagaaataaatataaatacttttttataccttgattggtgtggagacgtatatttcctacctctggccactgagagggtccaggagcaatgacactccagtagcaaagtccatacctatagcaaagatgttggttttgaaataccattatctaataaaaggaactaggactccttggagaagcagttgattttagggcttagaacatctgtctgtgatgtcaaaaaataagggcttaaaaaggataggggcacgtcaaaaggacatgggaccaacctgaaggtgcttctaatagccaaaactggaacaatttaggcaacaaaatatgatatattttatggaattataatctatagaataaaatacccatgaagccatactattagaataaataaataaatgaaggataagggacagctcttacagaaggattctggttaataaatatagcaagaatcagggaaatctttattaggcgaagatcacagaagtaattgttgcagacaagattcaggggtggatgttaaaatcagtatatttaacacagccttcaagtttttcctcccaagatatgtatcagttgcaaagggaaagttgatttctccactgtaattcgttagcttaaacaaatgatgaagggtagcgttgtcagtaataaaacatttcaacgtcagattttccttggaatgatacacttgcaaggacatatctgtgatattctagtcaaagggcatacctttaatctaatcttgagaaaacatcccaactgagagacattccacaaaatgaaccattattcaccaaaaatgtcagagtcttggaagagaagatgaaccatgtcaggaactgtcacagattgaagaagactaaagagacatgacaactaaatacagtgtgggatctagaagtggatgtgggaaccaaaaagggcgctggtgaagcttaaaccaggtctgtaggctagtgagtaggattctaccaatactaattttgataatcatacaatggttatgtaagttgaccttagaagaatctgagtgaagaattctgtgaaatctctgtatttatgcaagttttctggaagccaaaaattatttcaaaatagttcttaaaaagcggttcttcctaggtagcagaataaagatagatttatattttatagtagtataagtaatactatatttcaaagtagctgattatgttaagaattaagaatagcaatttaatgtttctattccttccccaatatttctccctttccagttttcgagggtgctatacaacccatgggtagaaagtttggtacagttttatttatagatttaaaaatagaagcataataattagagatttttagcatatatcattgtgttattaggtaggtcttggaatagagagtatatttttcacattcaactttatccatgtccattaagccatgatgcttcttacctctaattcattattttaaataggtatatttttccccactatattacatgaaataaagttgaaacaaaatattagagtaagtcatattctgaattttgtttgttgctagtcataggagaaaaaaagaaaaatcttccatgctgtcctcaaagttttaaaaattcttatattaaagacacaataatgtgtttctaaggtattgcctaaattcctgaaaattttaaggcatcttttgttttaccttttcagagtgtttttcttctgcacatgcccattgcaattaattggtattttccttgagcccacactaaggaaagctacccatgggaattagatcccagtacaacatacttttcatttgttacctttagttttgtattttattgttttaaaaaaaaatcattctagactgtacaagcctgaaactaatcttgactatatctaatgtgtaagaaataaatgctttttgtgttaacgatttctgatcatcatataagctttaagaataaaggagttttatatttccattgacaaagtgctgacacattgataaacaagtaactttagaaataatccctaagaattcaatatgtgctttaaagttttgcattatttatgtgtgcctaggtgatgactgtctgatttatgctccaaacctgtagattttctcctttaagcaaataagagtacatcatgattaataagtgatctctgaattaagctcactggacacatatatatatgtgtgtgtgtgtgtgtgtatatatatatatatatatatatatataaaattgttaatggcattttgatttaggcattttagtaaattttcactgttatcagaaattttatcttgtcatctatagagtagacgggctggacactttggagaacttttatagtaactgaattgtactacttcatgattttgtaaagaaaagagaaggtagaattttctagaatactattaaagctatgtagtagtctccaagccagagaagtaaaagcggttactttaggtagtgtaaagttggttcccattcattcttgaagggagatggagaggaagggaggtaaatcagtcaggaaatagaaaccacatcagttacctaaacagtggaagtttaatacaaagagcttctcactagcagaaaatgattaactactaaaagaggtaaaaagagactcaggggtccagagatactatgtgcaaaatatcagctactacctcgtctagggtgcggaagagtggatagtaaagtgactcaggactgggagaggccctcctccaaggctaagattagacttctttaaagagtcagtgattcctaggggaacatcgggcttgtagataatgaaatttgccaaagtggcctaccgctgcctgtgagtggaggcagcttgttgctaatctggaagtttcttcagggatgggggctagagctgatgggctggtccaagctggtctatagacacagcctgccattttccaagggttaggccatccacagcagcttggggagggaagtgtttttccccttgccggatctctccattgacctctatcaatgaagcttaacattctgccagctggcaaaggacatgtttccagagtccagctccagtattgcaaagcagtaggtaaacaatgaatttagagctgagatactatacattgctaactgttctagaaggaataatttactgttataattctaaatacagtctcataaatcaaaactttcacatcactaaaattttattatctgcttggttctttataatgctaatcatgggctaggcatgatggctcatgcctgtaatcccagcacttggggaggctaaggccgaaggattgcttgaggccaggagtttaacaccagtgtgggcatagcaagaccgtgtctttgaaaatttttaaaaataataatgctaattatattctctataaatagttattataatgtcattgtcttaagttttgaaaggacaatccagaaattgttctctattttgttgctttctgggaagtactcttatcatagctgggtagatctctaggcagtatagtcatggggtaggtttgaaaaccaggccatgcctcaaaaaatgaattctacctctgtagagtaagcacaactaactccattttgcatttacagataaataaatgatggttggcaactgttgtccccaaatttgcatttcaatggcctagtaatgtcccatcgcttacctagtacttcacaaggatgttagtgataaggaataattaatgatctgttaacaagatcacatctttgattataatgtacaatagatgtacaaattctatatttaacttttatttgccttttaattgctatggatttctgagcctgctactaggtgctttatcagactgaagaaatggtccctataatctcttatcctcagtcccagtggtcattacaatgtattttctccaaaatagaaaaggcaacctagttgcattgtatgttgtaaaatgttggagtgccatccattttagctgcggttgtcagttcactgggacagcattctgggagtaaagaaagaataaaaatggcaagcagaggatttactagtgtctttgtgttcatggtttgaagggcgaatactactattggcaagtggagaattcttcagacttttaagtgctacagaagagtttcaggcttgttaagctcaagctcatttaaaattctactttgtctgactgaccatcacatcacaaagcagtctgctcagaatgtcaccagtgtcagttctgtgacctccggaactgcatatagcagttggcttgagttgaacaggccactctgcttctgggaagagaagagttctgggcaataacacaagtcctaaaatattgatgtggctacttctaaagtatagcaatattacatagttatatgcagtgtgtcattcaagctgttttcattgcccagaaatcatagtgctgagcctatcttttgtcaatcaagttaattttggtaactacaaagtagagtttgcctttgtggacatttatatagggacatgtatatataattatataatgtgcttatttaaaagctatattttttaaatgctagacaaagattgaaatgttattgtcttatttagtacctcccttaaatcatgtacagacagacatccaggtaaacacagatggaaactctgtgatttttctgtctgaatgcctgtgttgcaggtgtagtggtattaaggactattgtatcaaatattaacttgtgtcatatgaaattgccatttttgagggtcaaagatggtcaaatattggctatttcacatggctcatcctaatagtaaattttcaactgtgctaggatttggaagtgcaccagctttttaaagcaaattatataaaccagagctcaaattaacaactggacaaaagacagacaagtatgatgttaagggaagtaaaaggtaatgagtgacttatgactcagtcttttactgcagcagcataaggaaggtgtgactctcatcactgtatcgatagaaagtgttttggttaacagattttttcattctctcaaaaatgcgttttatgtctaggaatgtgtgaatttttgcaggttctttcaaacttgcttacgtggttgccctcctgacacaccacccagtaggttcttatttcagaacctttctgaaataaatattggcctttctgacttaaatatcaaggtgattgcccgttggcagcattgtgtattaatgccttgggtggtagttacttgcttttgttttatacttaatagcaaccttgcctaaaaacatactagagagtacctcatcaaccgttgaggttttgcatcttttattggtctgcctttattttctgatattttctaaagatggtgtttcactgaggtcttttaattccatgaatgaagttgtaattagttcggtattatttttaataatcttcattctggtggtaaaattcacttgttgttttgagagttgagctgtggatagtaagtatccattaataaaacagtagccaattggtatatttgtttttcattttatttttattatttatttatttatttatttactttgagaaggagtcttgccctgtcacccaggctggaatgcagtgacgtgatctcgactcactgcagcctccgccacctgggttcaagtgattcttctgcctcagcctcccgagtagctgggattacaggcatgtgccaccatgcctggctaatttttgtatttttagtagagacagggtttcaccatgttggccaggctggtcttgaactcctgacctcaagtgatgcgcactcctcggcctcccaaagtgctgggattacagatgtgagccaccacacccagccatttttccattttcaatggaagttggatttggtgttctgtcagattcaagaaaattactatggaccacaagtagattccttgccatctcactggtgataagcaatcattttgttctgttatccagaaatgaagttattttaaaaatttggttgtgacctcgtttgattccaccttccatggttcaaaatctagctaaattacaatgtgctattcagagaattttttatttcctgactcacagcttaacctttaaagtgcggttaatgcagtgtttagttaatgcattgtttaaagttgatggattgataaatttgcagaactcttttatcttaaatatgagaatgctcaaaataatttttttttttttgagatggagtctttctcagttgcccaggatggagtgcagtggcgcgatctcagctcactgcaacctctgcctcctgggttcgagtgattctcctgcctcagcctcccgagtagctgggattacaggcacctgccactatgcccagctaatttttgtatttttaatagagacgaggtttcaccatgttagccaggctggtctctaactcctgacctcaggtgatccgcctgtctcatcctcccaaagtgctgggattacaggtgtgagctactgtgcctggcctcataataatttttaatgcagtgtatttttcaaaacctcagctattagtatagtttttaattagaagtgttctgcatttaagcttaattacctctaaacttgctaacaataatagcctaacttttggggcaacaatatgttttttgtagccttttgatttcaagatactcatgattttttatgtgacattattaggtttttacaattattgcccctgtgcagagtggagagtggcagccattcctgctttccacatgtggaaaccaagataaagaatgcactttcttcctgacagaaagaaagaatccatgtgcagagtcttttgctcttatttaggattattaagtgactatgtgtaagctcatgtttgaatacattatcttgcttaggaaactcaccttcaattaacccttttttttgagcttcttccctgaaaatgccagaatctttgtggtgtggtcatctccagatgaactagagaacattaacaaattgttatataaaacagtgagagaaccatggaaggaatgacgcagctacttattagggcaaatgttctccaggcaaaaaattgacccgaagccgttacaaacataagaagaaagtagatagatagtctcacagattgaaaggtaagtgtggcttagagagtatgaaaaaggtaggactttggtgaagacaattaaacctaaaatttaaggagtatcttacctgaaacaataaggaacttgtagactgtattatttccctttatgattatagacaatttctgtttgtttattttgttttattctgttttgagatagtcttgctctgtcatccagtttagagtgcagtggcaccatcttggctcaccccaacctccacctcctgggttcaagagattctcatgcctcagcctcccgagtagctgggactacagttttgcaccaccacacccagctagtttctgtatttttagtagagacggggtttctccatgttggccaggctggtcttgagctcctggcctcaagtgatctgcccacctcagcctcccaaagtgctgggattacaggcatgagccactgtgcctggtgtgattatagacaattttcagaagatattgataaggatttctgcttagcttctgactacttttattctagaggattaagagttacaaatgtaccctgagaacttacaattcaaggaaaatcttttatatttagtagcagtaactacatgaaattttatttatatttattatgaaactatatatatatatatatatcatatgaaattatacaggtgctaaaagaaatgtaatttaatgtgaaaacacctccacttacagtgactgagaatccaggagcgatttatctatttatatttctttcaaatattataagcaaaataaaaagacaatactaactgtagtggattgaaataggaacctatcaaatttactttgattcattgaagagttcaaagtggtactcggggaaaaaaaatcacataaacctcagtgtcatttttgaatgatgctagggaattaacttattttgaaaattagtacattttatacacatgtacctcagcataatcaaatggttgatgaaaggaaattcttctttataacaatattgtagccaataaatgaagaaggaatgatggaatataatcattttgccacccctaatgtattaatggacctgggcaatcactcctaatatcaccgtaagagagagccaggcattgtacgcttctgatggaagtacatagcagatctaagaaatcgttaaaaattcaaactgaatctgttcaaccagtttataggaactacaaaggctagaaaacactttaaatattgtcataggaatatactcagcaggatccagatttgaggagactctatgggataaaagaactgatttcttcaagaaaaggggtaggggcaaactgtagattaagcgatttaggagacatttgaattatgattggaagagacagatgtaaataagtgaaggaaagaaaaaaggcatgaaagagacaagagagggcattaaagagggggaagcaaatgagagtgtggatgaaacaagattagccactggttcaaagttgttgaagctggatgatgggtacagcaaggcttatatgcttcttttttctttttctttctttctttccttcttttttttttttttttgagatggaatttcactcttgttgcccaggctggaatgcaatggcatgatcttggctcacagcaacctccacctgccagcttcaagtgattcttctgcctcagcctcctgagtagctgggattacagacatgtgccaccacagccagctaatttgtatttctagtagagacaggatttcaccatgttggccaggctggtcttgaactcctgacctcaggtgatccacccaccttggcctcccaaagtgctgggattacaggcatgagccaccatgcccagtctacacttctttctacttttgcttatctttgcattttgcataatgaaaaagtctaagattggcactggctgtcacacagaatagtgaacttcatgccactggactgtgttctgcatctctaggtctgcagtggagctaagaatttgtgttttcattaagctcatcaggtgattctcaataccaaccagggttagaaccctctgggccggattatctgttaagattctttttcactcagctttccaagtctgtgtgttttttaatggtataaagatgtgctacagagattcaagaacaaaatagctggggtgaccatctgtttcctttattttggtaaaaaaagtaaaactgaactgagaccttgaaaaatgcttaaaatatggacggtgaagtgtgaatcaattctttcattccacaaatattttttagtgcttcctcaatgccagagagtatgttaagcattggggtatggttgtgatcaaaaatggttaaaatgacaacagttataatgacaataactttgaacctcacttcttatggatgccttctattaccatggagggaatgccggtttttgagacaggagctttggattctggacgtgccgtgacgcttggctctttagtgtggagtaaaccataataacctctttgaggtttgattttctgatctgcctaataagattgtacccttctagctcttggcttttgtaaaataggcatgaagatattttgttgtaatctttagctattctcttagtctacttgggctgctataacaaaatactttaggctcggtaatttattaaaaaacagaaatgtattgctcggcagttctgaaggctaggaagtccaaggtaaagactctagtggattcagtatctggtgagggcctgttcctcatggatggtgccttcttcctgagagtcctcacttggtagaaagggtgaacaaactccctcaggcttcttttgtaaaggcactaatctcattagtgcccaggacccccacctcgtaataccatcaccttgggggttacatttcaacatatgattttgggaggctacaaacatgcagaacagcagctgtatatgcggatgtggtaggtgggaccgaatggctttttggcactatcgataaccataacatctgtttgtcattgagggtgggagtgtattctcttttcttctgcctctataatatagttctataaacatgcatttaagcttgtatagttagattctctccataagctgaaactggtctgattttaagctcatttactgtcttagaacagaattgatcttgctttcacatttgattcaccctccacagacttcgagaggaagaaaaatagcattgctagttcagtttaactaggccagagttaacagggcaaaggctgggaaaccagtttttggaatattggtttgcctttctctgacttatttttatgtgctaatacatgttgatcattcaaattaatttctgccatccttgggaaactctgccaatcaagcttttcacttttcatacatgttaaaatgattcagcacttctttgattacgaacccagtttatagttgctgggatcatctggagaaaacaatatggtgtatttcatttgcaatattaaacataaaactcctttgcagatagcatcctaagtgtggaatatgacatacattattactttcaaacaagtattgtatataatataatggtcagacagaggctgtcaagtcaggtcaaccttattttggcaattcaaacagtataatctagaataagttatttaggttttggagaagtaatttttctcatattcaaaattgaaactactatcatctccctcacaagtctgttttcagaaatgagtgaaatactacatgtaaacacccagcacaggacctaccaggtggactgccacctaccagtcagtcagcaaataaaatttccctgtttccctctttccttcccatcattcaatcattgcactgttttttcttagtttgataacatgctttatagtatttttaaaggatcggagtccaataagttttcctttgtaaaaaatagtcaattttcaagtctaagtataatttccagataaatatctgtgattgaagaaagtaactaaggaaccgtttatctgtacatatgtacaggagtatggagggagaggcatataatatatcaagagtctaccctgtgttatttttactcctatctgttcaagaataggtcttacctctgtctcattttatctcattgaatgaggaaacttatacccagtttgttacccaagatcaaacagttaccaaatattaagcttgggattagaatccaggtcttacttaatagctctctcctaccatccatagatttttagtcactggagagagaaagaagggtagcatttggcttctgggtggaaaggggaaggggcaagatgtggagtgagggaatatatctggattgtctggaggacttttaaaaattatactccctccagttttggaacattttgccattttaaaacatggtttggtaatgtcatattcttcaggtatgttggggtagaggaaaagattgtgcactattgttctgtgatatactgcctagacatgaaattattatagaaataattatagcaagttaaactcatacatggttgtaaagtttgaaaaatactttgacagccttatttatttttctttattgctcctagacaattttgaagtatttggacatttttatatgttttatatataacataagaagtgaataccgtattatgttattttaggttatgcttagctatcaatggcaatagaataacagaaaaatatattaatatttcttattttggtttacagtattctttcaccttttattaaaaatgaagatggtgttatagtgcttttcagtctaaatttgattatatggaacaattagctaatgaaaactaagccatttgctgctattttgcaaatttagtaaaagaggagttatatttgagggaaaacttaggaaatattaaaaccatacactagccaataaggtatgaggcaactaattgcttcctgtcccttttgaaattgctcagcctgaaaaaagatagcacatattgatttactgtatagtaaatgtcccattgtttctctccctttaacatccagacacacacacaccctgccatacatatgtacatggcagtagcagcaagagctgcatatctgacaatttcttccttcaaacttacataataacaaaattaggatggaatattttcttcctttgtaaaagaaaattgcataaaagtattaaaatgttcaaaagtgaacaggagtgtagtgttataaattcatgacatgtttgtttaagctcaaaagataaacaagttcccaagggaaaataaatatttcctgataatgtaatctcagtctgtcatatatgttagtagcttctatagatatgaatatatgatattagaagcaatgtaaaaacttagcctgtatttgataatttttggggaagttgatatgaagattatgcagactcaaatggtactctccaatgtggtctttcactctatttcagaaatggcccactaatctagagaatgaaagttttagtcatatgatatggtatgttttcactcctatatagatttttgtcctgctatttgtgatttttctccaagcatttaattttttttcaacatagactttgaaatgctagttgtaattgtcctaaagccaaatcagtaaaattagtgagaagttccaaaaacatccagattttataaagcaagcttctctaaagggtaatctcatgtaaacatatagatttcagaagtacagtatcatgttatgcttcttttttgtcttaaatgaatgtaaattatctaagatttttaattgtctgtgatttcagtttctatagctcagatagtcgggaattcatattatagtatcttgtgctttatcttgaaaggatcagcgcatccttatttgtagaagggagagtattttgtgattgacgtgacttttcctttgtaatattctgttacttaaaagttattgtgtatccttttgttaaaaaatatttctttggaaatatatttgccttccctctttgtttgacattgacatctcttccagaaagagccctgctgcagattttcatagagctttgttgaggcctgtcttgtaaatacaccagcacccctttcatcccagaattctgagcgtgggcttgctgctgtggtcaggctgggaactactggcgagttcccattaacacagccaccacttctgggttagataatggactcaaaggttaagagcagaagatctcaacagctccaatcagcagggcttttccagggctaattacctctttactgcgctgactctaatgtgacatgtttattgccttaactaacaactcattagcttagttgatgtttttgtcaatattaattcgttcatttaagccaagtcaaagcttaaacaaagatgtccagactgagaaacgggcagcagagtgacttttgtttgctcatcttttttcccccttactcaatttcaataaaataaatgtgtagaaaggaaacatttaaagtgcttgtattgagaatgtcagtgtttgtccatttaccaacatgtaaaacaattctgaatttatttctcctacacttactctagtatccatatcacagtgtactgagtatttagtgtccaccaagggcatacttatctggggtctttgactgtgtatgcgtaaagggttaacactcagcaattccttgttccagttgagtcctttactgtggttattagaaaagagatcaaataatttttcatatgattttaatctccactggactacctataagatcactttgagatttatcttgtaatgatagcttacttaattagcttatgtgaattatttaaaagaagagacaattatgaagttataatgaaatacttcttttcagtttcttgccatatttttggttgacattaatggcatttctttggagaatgtcattgtttgggttttatgtactttttaataatactttaattcttaactctctacattagcgcgaatggataaaaaactgagcatgagcctttgactgagtggtaagttcatcactttggggaggtacattgacaccatcagaaccctggaatctgtggcaagccccccttcacggatgtttaatggtgtatgggtgaccagaaagggtgaagatgcattcctgtagaaatcagaagtgagtgagtgaagctggagtgttaggtgagttttatccctgggaaggccagagactcactctgattggttgattcctggaggtggtcaggcccagaggaggctgatagaagcaatggatagaacatggactgctacttcatttttagtgagaaatccgtgtcacataaaccagagacactcatatccatttcatccaccattctcttcctatagaaggttacaggaacaccaagtttaacatcatgattaataagtgatctctgaattgagctcactgcaccaaattatcagtagccataggaaatcatggtcacaggagatctatataattgtgtacattctatactaaatactctgactaaatttaccttctctgctttctcagctaccattctttcctgaatttgcttcaaccaggctttcctgcctttcaccctactaaaatctttttgtgaggttaccattggcttataaattgccaaatccaatgagtgattctcagcccttgtctcaggctcttggtagcatatgataattccaactatgttaaaccttgacactttcttcacttgttttcagtgacatcatctcctgcttttcacccacctcattggccacttgtactcagtcttgacattgcttttcaacctgtaaaagttcttcagtatctacattaattctgtaggtatcacatccagttccatggcctctgagccatctgtacatgtatttttagttttaatttaatttttttttttttgagacggtctcactctgtcacccaggctggagtgcagtggtgtgatcatagctcactgcagcctttacctcctgggctcaagggatcctcttatatcagcctcccagctagctgggactgcaggtacacacaccatgcctaattttttcaagaattttttgtagagacagggtctcactttgttgcccaggctggtcttgattgcctgagctcaaacgatcctctcacctcaggctctcgaagtgctgggattacaagcatgagccactgtgtccaacctaattttaattctagtgctggtttctgtattggtctccagatttgtgtatccagtgacttagctgacacccacccttaaatgtttgatgcgtatctaaagtttgaaatgtcccaaaactaaactttggataactgccccttgcttcaaaacaacaagaggaaactcttcttctctcttattatcgtttcactacatgtaaccaccattcacctaattgtttatgcccaatttttgagaatcatactttctttctgtcatgactacatctaatccctaaattaatcctgtccactctatctttaaaaaaaaatgtttttaatctagaattcagacaagaaagagtggctcatgcctgtaatctgagcactttgggaggcttaggtgggaggatcactcaagcccaggagtttgagaccagcctgggcaacagagtgagaccccatctctacaaaaaaaaaaaaaaaaaaaaaattagcctgatgtggtggtgtgcacctgtagtcccaggtactcaggaggctaaggtgggaggatcgcgtgagcccagtaggtataggctgcagtgaactgtgatcacaccactgcactccagcctgggtgacagagtgagaccctgtttcaaaaaaataaaataaaaaatccagaattcagttatcactactccatgactcctgttatagtccaaccccagcattctgtcttgcctgagccgttgggagcctctcagtaggcctccctaattttactcttgccccactacggtctattccatacacaggacccagctgctttcaagttgaaagcagtctgcatcactgtcctccacataaccttccacaagtttctcatgacacttagaataaaaccccacatttaaaaggcccagcatgatccatcccgcagctacctctgtgacttcatgtcctaccactctgccttgttcactgccatccggccacactggacgttttgctgtccctcagagatcccaggcaggctcctgcctcagggccctttgtgcttctcccacagatactcacacgattctctttcatctcactcaagtctttgttcaaatgtcaccttctgcagagtccttccctgtctgtcactttctaggatcttaccctgctttatttttcttcacagcacttagtgccacttgatacatttgtttatttggtttgtatgtcccaactagaagataagcttcagaagagcatagacttttgtaaatctgcacttaaaatagggcctggtacacagcaggcactcagtaaatacgaaatgaataataggatcattcagctaataggtgctcgagctagaactgaaacctggctgttctcttgtctgtctcccttcctccctccttccatctctttcgctcatgccattcaatagtcctcccgcttttgggaaggggatatagaagtgttcggactattcaattaaagattcagtaggttaatggattttttttaacacctctttgaccacataaacatctgtttctgttatttacttctttattgctgatcccctgaccatcaaacaatcagcactttttaccttccctaggtagaagacggctacatgcattaagtaacatcattttgctcatttataggaagctaagactgtctcctattttggtctgccatccaaaatacattataccaaaagcaaaatgagattaaatttccctacatgacacaacttaatttgaaattcagcagaacagaaaaaaatgtgctttaaatcaaagagaatttggattttatactcttctgattataggacaggaaatagctaactactttgaagactgttttgattaaactgatgttaatgaattttaaaatatctttattaaattaatttcttaatttaacagttattgtatgctttccattaaaagaaatgacttatttttatgcagtacaggatataaaaagtttgaaaacaatttttaataattgcattaacacaaagcttctagttatagaagtgtttctcaatccatattcataaataatgggtaccttggaattatttttaattaaatcaaggatgtgtataaagcaaagaaatagaattctagatggcactgtgccatccttgttctttgatggacattagcaagtgggaaaaggcttcattcacttggttacactttgaaataagtggccaatcattattaattcattttgcactcattgtaatggcataaatcatcataaattcatttggtttaaagtgcatataatatattctcccataggaatttggttgtaattgagctactaattaaagtatttttaaaatatgacctttttccccttcttcactattcagatccagcaacctgcagtggctatgtcttcattgatgattttcttttaagtatgaggaatgaaattgtcttaactaggccagttgactagcctaggggggaccaaagcccgagaaagtagttatttgtgtttcctaccagcagacagcagtaatactcatgaattatccctcaggggtgtttgaaaaattctctaaaactctctggttttgtaataattctattaagaaaatgttattctccctagtaaacatggtttgactcgttttaatttctaatcctaaaaactcctctctctggccaatggtcttctgttagcattggttgccattcaatccaagttcccttgcctctagcgagggaccctttgtcatggaggagttctcccctcctcctttctgtgtaccatccgtccacattttcctccgtcagcctcctcagtaatccactgcctgtcactgtcttctaatgggtgtactggcggtttatgggggcttatgatggctggttctagaaacttcctgcgggtaactgcagattcctatgaggtctttgggtttaagggaaacatcaatggaaaacttagacaaaattttttttattatattttaagttctagggtacatgtgcacaacgtgcagttttgttacacaggtatacgtgtgccatgttggtgtgctgtacccattaactcgtcatttacattaggtatatctcctaatgctatccctcccccctcccgccaccccacgacaggtcccggtgtgtgatgttccccttcctgtgtccaagtgttctcattgttcaattcccacctatgagtgagaacatgcggtgtttggttttctgtccttgcgatagtttgctcagaatgatggtttccagcttcatccatatccctacaaaggacatgaactcatccttttttatggctgcatagtattccatggtgtatatgtgccacattttcttaatccggaacttagacaaaaatttaaaaaaggaaataaaaattacaaatggaaggctgggaacgacgtcactagttttacaacttttaaaatccttaattatcttgtgccatttctgcacaaatggaaactattttttaaaaaaactgcatgattaatatctcagttgcatctgtggttataagaaaataaaggtgtgaggcacctctggtattgtattagtatacaccactggcattttactgtttgtgtgtatgtgtgtatgtgttttaaatgaataaaataattgtagtgattaaaagaagtccgtgttctgtttgggaggcccgaggcaggtagatcatgaggtcaggagttccagaccagcctggccaacatggtgaaaccccctctctactaaagataccaaaaattagccgggcgtggtggctcacgcctgtaatcccagtactttgggaggccgaggcaggcggatcatgaggttaggagttcgagaccagcctggccaacatggtgaaaccctgtctgtactaaagatacaaaaaattagccaggcatggtggtgcatgcctgtaatcccagctacttgggaatctgagacaggagaatcacttgaacccgggagacagatgttgcagtgagccgagatcatgccgttgcactccagcctgggcgacagggtgacattccgtctcaaaaaaaaaaaattccgcgttctgtgtgtctgttgtgtatgtgctgtgaactgaaggtcctactatcaggtgtagtccctacccttgttctaaagatgtaagagaggaaaagtgaaatagcaatataaaagtgttatttatcaaacaaattatgctgaaaatgatacgtgatgcttataaaaatatgtaactatatttctttatagttaatgatgtgttttcctataacaggcattcaataaatgtagcgtgcgttaataaattgagtctgtgctttgtgatagggataaataaatgttccaaaaaagaaattcattaagcaattctaagtaataagagagaacaaatgtgtgtgcatgcatgtgtgtgggtgtgtgttatggcttttaaaagggctagccattatacgtagccagatactacaaaagttttaaacattggcatttttcactggtcggttcatgattgaacaatattcatcttgctggagcaacaagttacccatagtataatactgtcatctatttagccacagcttacataggctttattttgcgctctctgcctcagtccttttctcctttttagcattttgctgttacagcaaagtgtaaatattttctggcagctttgctctttcatatcacctcatagcacctttaaaaaaaaagtacaattaaagttgggactcttaagaaatgtaaaaatttgatatgaattaatagcattaaaatatgagctattattattcttgacagcataacagaattcatttctcaacagccagagggtctaagttgtgatgtatccaatgctggattttaagtgttttctgctttttaaaggattttgtttcattttgatttgtcttctagtgttctgagtctgtctgcatttcggtagtttatttgtacatttggcctgacataacagaggtggtgctgagatgttacacactaaattctcactataaagctgctgcagtatctgtactgctcacctagcttataggtaagaaacaccactgatttgataacttaatcttgaagatggccccagattgacatgaataatgctgaattccatcttgtaacaagttgagttaggagtctcttgacattctcaataaagagtcagtgactagtaaaaggtcttactgtttgtgttacttatatagagaaggtgctctttagttcccccaggatagtaaatttattacaaatggcaatgatttctagtcttttggatatcatagactagtaaaatttctaaaaataaaatgtgagggcatgtattagtactatttcaatttttttattttgttttttataaacattagagaataccactctattaaaaaaatgtattcaccaaaaaaagtggtaagaaaatcacctcaccgaaatagtaagaccataccgcagaataagcactcctttacattgaataaatatagctttatgaaaaaacttagtacattgtttatatttttcatatttcaccatacaactggaaactttgccattgtccaagacaagtttgtagcagactcttagaaatttctgacctgtgcataattttgactgtgctaggcacatatggtataaagtaattttcaacatttaccaaagcaacaattatatattaagttcttattgagtataaagcactgtgctaagccttaggccaaacataaaagtgtttttcttgaatgtcatttggcccagggaacttaacctgtttagcaagtgtgaaaggtaaattaataaataaataaaaatagctttaagcaatagaataaatgccaaaagatagtatatttgtgtttgttcactgtgtgtgcagtatttgctatattaaaaggaaaaatttcattctaacataagcagggaagatgcagtagaaattggtagctacctaccccattcaattctccccttccaggtcacaaagcctcagttttgttgaaactggcaatatgtacagctgacaaactgcatttcccatcctccctggaaaatagggaattattatatggtataattctggccaatgaaatatgtaattagaccttaaaaggagctggacttaactgacacatgtccttttgtccttcaccctcctcccacttcctgcctgggaagtggatgctgtgctggatgtggaattaaccattttgtggccatgatgcaactaagttagagcaaagacaattacaggaaccttggtattgttatctgttgcatcagtgacaaaaactcattgtttgagaaaagataaaacattacttcatcttctgttttggggagatgctcgttaactcagctgaaattatttctgaaggaggagaaagtggacttgggattggttgtagatgtagttctgaatccatagttggtagtgtcatgaatacagcatgttcacaaggatataaattgtgtactagttattacacattgttggggccacagagacctcaattccttacccagagctacacctaaccacttgtcctccatggttctgttatctcatagaacatagaaatataccagatttttctaaaggtctttccattcagaaattctatgattctaattaatcccatttggctggggatgagaagatcagaattaaaagggcatttgcccttttctaatcacatgacacctcaaatactgattttttaaaaatgaaatgtgatcagatctctcctttgcttaaaactttgtaatggttttttattatcaccagaataaacaaattccttagcgtggcatataaggccctttgtcctggagctgtaataacctgtcttgccttttgtttcactgttacacttcatccccccgccctcttctccccttcacctatttatcccttccccaaccatacatacacacagtttctagccatgttttactacatgtaaccccttgatcttgccatgttccctcttatttcctggtctttacacatgctctttcctctgcctggaatgttttctttcccttctcctttaactggctaattcctacttatttttaaggttgtggcataaagatcaccttcccctggaagccttcttatagcccccaagatgaggttaagtgcctctgttaagctctgtcttgatagcttgtgcttataaaaattataacacaatgcacaatatattcagattgcctgtttgctcctgtttcctgaattgtaataaatttccttaagggaagaaactgagtcttattctctttttttccctagcacatagtagagtatagcaatttgcaattcataggtattacatgaatctttgagttgatgggttggcaccaaatgcgaaaatccttgactgaatgccaggccagttagctgaactttttaataccgtcactggagaacctttaagaagggattggtgttgatgctcaatggtagcatcattccccaccttgccctctcagtgagatactgtggaatagtggtccatttatatcaaataaggaaatatttattttctacaaaattagattctatcttatacagattaaagtatacaacttttattcaataccaactgtttaagaaaaattatgggaggcaaaattcataaaattctgtcatgagactttatcaaaagggaagacctatcattatcttaatttcagcatttggtcctctttgatccatgttgcagagcacctgtgtcatatggaattataaattagaaaacccctaaattagagaatacaatataagttaagaaaggaataaatttagctatatctttctattatataatattttttaaaggctggtttcttaatatcagcataaagaatagatgattaagaagtttgaagtcttaggcatcccagattattcctgcagaacatcattgtcattaatgctagtagcagaaaagtagtatgcttcctattaatcaacaaggctagaaatcaaaaggtttaacttgaatatcctttttcacttctgttatttacatgttttatttgggaaaagttgttagagatagacagggagttttaacatttgtacatctttgtaattccaaaacagctccctgaaaaacaggaaacatcatactcttaccagtagatttgaaatttgtgtgtagagtagcccattttcctctctccttttaatgccctcacatggcctgccagagctgtaaaaactgccctgccaaaactgtagggatctttactttatgttacttggagactataatttgaactaaagaaggagagatgctataggggaattttacttatgagatcgttgagtgaaatagaacatgatttaagagaagggatgctggtgctctaggggccctgtgttttctgctgagccacacattctcacagtgaggccatgcttgacagaggagcagcaggcactcttgtggcccttgtagagccagggtcttctgaaaggagggtcttttgaaaggaggtagaaaaggagaacgcttttctgtcatttcatccaagtgcaagtgatcagttcccctgtgctgtccttcccactttgtcagaacagtgatggaaaatatcaaaacatcgaccacttattgtttattttcactctcaggaaaaaattgtccagagcggtgaggaagcttcctctagagctcccaacacagaggcccttaggaatcagtcaggcctctagtgttgcctgtatgctcccatctgtaatgaatacaaaaatggtaaagtgccactaaggaaaatgactgaaatgctgtaaaagattgtacttaggaaactttacctccttttgcaatatttagcaaggattcacctccagggacccttattgcttagattggaagccatggctgctggtgtttcaggatgtctgcagagaatagcagctggagtttttctgtagctcttatgacttccaagaagtaaaaaataaacaggaaaatggtagataactagacattttgaaatatcattctgacaaactggggcagggagctgtattagaaatattctgacagtaaaggcagacctatttttcatttatgtaaataatgtgtgcactgtggttggtggtttagaagatgcaaagttatgtgaaacacagtttctaccctcaaggagctgacagacttactgaggaaaagggaaatgctcatatttaaaaatatgagcatttcatgtgataaaaggacacgtatgtgctggcagaaaatagaaaaatgtgtgttaccttttttaaaggagtttaatatttttctgatccaaaagtaaaacatgaagctttacatattataattatatggttaaatacaaaagtaaaatttacaaatacacatacgaaatatgaattttgggatgtttagtttactgcaggaattgttaatctacaatccatggccgccttgacattcttctgcagaatttgatgggtatgactgtgtgtgtagtttcctggggaaaggactgatggctttcatcagattcttaaagggttccatgactgagaagaaattcagaatcactacttttcagtgtatccactgactcttatcctggctttacaatactcttcccttctcttcctttccatttcaatccattctcatttaacaattgactataatataaaaattattatatacttttgttggttggatatgttgtattaaagtttatatgccattttcttcatttagaaaagagccatgtttaataggtattcagaataagctcagtagtatgagaaaagtcaggctcagtgagtaccttcctaggcctgcccccgataagttatggaaccgtggttaattccctgtcttaaacctgaagcatgtgttccttttaatcagtatactgtactgttctgtgacttaggaactattttctttcttcccctcaaaaaaacaaacaaacaaaaactcttctaaattacaattggcttttcgtaacccctgctggttttcttttttaaatgtcaaaatgccttctgaagtagataaagttttgtggcttaatagccactagacgtaagtatacaaattgtcagcatcatcgtcaacataaaggaatacatgttcattaagatctaggtcatcttaccagatttagaaataatattgaactattaacacgtttaacaaaatcatatgaagagcttaccacacacttgacatcattgtactatatcagtacatacaccagaatatagaggaaaatagatgctttaggaaggaagctttttcaaactacatgttctacattctccatccttcattgcaacgcgcctgtaatgagaggtgttactgagggggagtattttacatatgaactgtgttagatgcagaagaaaggttaagaagtaccacattacattatttgaaaccatctccactttgcagaaccctgagttagggagaaacattgtttggaatttaagatcactgatatgttttgaaattatatatactcatttacgtacaatatgtaattaaaacactttagaatatggtataaaacaatatagcctaacttttctcttcaaagaatgtggctgagcaaaccatttatccaagatcttgtgtagtcttgaggttcaatacctttttcagttaaaaaatcaaaaatggattatattttgaaagtatgcttcaaaagaaacaattacaaaagtaaaattccccttttgctctgcattttattctataatttcaggcaaggcactgacgtttcttctgctacagcctccaagccccaaacttcctccacacagcactatccgaagaacagccattgatctgattggacgtgggttcactgtttgggagccttacatggatgtgtccgctgttctgatggggcttctcgaactttgtgccgatgccgagaaacaacttgccaagtatgtgtggattccggttaatttaatttgtcactgttttttgttttaggggtttttttggtgggtttattgatcattctgtatagattgtgcatgtttaatagataaaaaatacacaaatgtttcaatatgtgaagttttgaatatggacaatgaaaaggaagcatgtttctataattttaacacaatcgggatttagccctgagccagtgaatgatatgtgacatagttttccaattgtatttgttataccgtgaagtattactcactaataatagtataatattgttaataaggaaaatgatatatatattaaatacatgatacttgatcagaaatgattatggccagcatacgtggccaaattggggaattgctcctccacactcatattagcttttaaatcaactacgttgaggtttcacttaaacacagtaaaggaccagccatgaggaggtggcagtgatccagggaagcaatgatgagagagttctacaagaggaagatgaactgagggagctgctaaagtcaaataggtgggaaacacacgtggtgaccaactgactaggattgatggggcagggggtcctattggtggtggagattactgttggtttgaaaactcaatctcctgattcctgcaaagagttcttttgtttccttttggtgtataatacacatatcatgaaatttaccactgtagccatcttaaagtctataattcagtggcattaagtataatcacagtgttgtgcaactgttaccactatttagtccccacagaagtcaccctgaatggaagccccatgcccattaagcagtcctcccctgttaccacttcaacaggccctggcaaccattaatcttctgtctctgtgaatttgcctattctgcatatctcatataaacagaaccatacaaactgtggtcctttgtgactggcttcttcactgacatgatgtctttcaaggtccattcatgttgtggcatatcatagtgctttgttgctctttatggctgaataacattccattcatggttatatcacatatagttaatccatttacctgttgatggacatttgggttgtttctgccttttggctattgtgaatgtagctgctataaacatttgtgcataagtatttgaacacctgttttcatttgagtagacatgtaggagtagaatttctgggtcatctgataattccatgtttaacttattgaggaaccaccagactgttttcccaccagcagtgcacaacagttccattttctctacagcctcgccaacacttgtttttttctttctttctctcttttttatttttttagtataatcatcccagtgggtatgaagtggttggaattcttgaactgtcccataatgcctcccttaacgaaaatgttaccaccacttggattttctcaatgaatggtgtttcattcttgtccttgctaactttttttaagagtagagttcttagccctttgctttgccattcccttaagttctggcatgctttgggtccatagttgtctactgactgctctatgctcaggaagtagagaccagagaagcaattgaaggctagaatggaactctgtggctttgtctacagattgggcattgccagcgtaaagtcccaagaagattggtagaggacattcattcaaacctaaacagctgctgcctgccccccagttacctcctatcatactaccatgcatcctaaactttacctcggtgtctccctagccgtatgccctccagcaaattactttacctctctgtatctacaagttggggctaattaaagtacctgtctcctaagatatattaaatgagcttatatttgcaaattgcttagaatagtgagcatatattaagagatgaaatgtcttcctatgtggcagaagtactggtggtactggtggtgatgccattgttaggtccttgtattcagcagatcaagagctgcctgactctagaatgagcagtttagcataatggtaggcaggatagttttctggatacaggaggcctgaagattctcaatgggacttgaaggattaggaggcaatttgagcccaggagtctgtgcctatagtacgaggcagctggcctttgcatgaagctctagaacatcttttcaacctctgccctccccttggctgcagctgccatgtgcacccgccacacatcaacagtgttggcttctgttattgcagctctcctggtttgtcttgagaaacattcacatttttcgattgtctgaaattttgctttgacttaattttggagcttatttttaaatctgatcaaaacacaatttcagtagtatacactgttttgttgcctgggaggagaagtgaagggcttttattcagggttagtatttaatattttgtttgattttgtttttaaagaaatttacattaggcttgtaccagcaagcataaagatgtgcttaggtcttatctacatgtagtttgtccacagacacaaacactgaagttttcagtaggcaatttaaatcttgctattacatccttttctgtcatgaagattagtgtgactttctgtacacagctctgaataaatgaatgtatcagcatgtagccttgaggagtccaatgtaattttcatcatgataaattgcataataagcaagaaaatgtttgcttattaatctataacaagatttagatggaaaatggcctgttacatccgtgacacactcggcagagggtgcagagcctgagatggtgggaagtggagcagcaatgtgtgcagagggttaagtgtggatcttacccttgtgctgccctgttgggctgcccctttttgtgcctgatttactgtgtacacagtaacggtgctcagccgccttgcttctgtctgtgatgttaagcttgctttatgaagaagcttttatgttaggcctgtgctttttaaaatttcagttcacgtttattgaaaaagaaaaaaaaacataagcagtgtttcctactttcttcttattcttgtgagtttatgagggcaggggttttgcggaggggcaaccaatcaggtcccctgccttgtctagagaacacatatcatggcagagttcccttttgcctctcccccatgtcccgacatctcctgctgagctgactcctaagaggtctcctaaaacactgtatatgcctcgagatgaagagggtattttctggctgggcttggtggctcatgcttgtaatcccagcactttgggaggttgaggtgagaggatcgcttgagcccaggaatttgagaccagcctgagcaaaacaggaagacccccccatctctaaaaaataaataaataaaaaattaacagggcatgtggcatacacctgtggtcccagctactcaggaggctgaaggggaaggattgcttgagccaagaagttcaaggttgcagtgagccatgatcgaaccactgcactccagcatgggcaacagtgagacccgactcttaaaaaaaaatagagtatttttccagaattggttacccctttattttagaaacatgatatgcaactttacatctttgaaatcaaaatatctacagttgttttctaatgttttcagatattttgccaaattttaactattaattaatcaagcatattgtataattaatatgtgaaaagaacaacattaggttttctctgtagttgcaaatttgaatcaaaaatcatgtcttcaagacagttgcagtcttacaggaaagacaagatctgccccaaaataaccatgatgcaaagtgggaaggaaggtaaaaagtatagacattcagggcatagtgaaatgaatcaccctgggtaaccagaggggatgcaaggaggggtttcatttggatctgtcatttgagtagttatgaagagagcgggggaaggacaggggcatgcgaaagaaaggggtaggaaagcgcaggcatgccaaacatctgtgaaaggaggaaaatgctatttttagctaattttatttgttaatttcttgtagaacttaaactgggattctcccatgtaaaactgaaacacagtggctggacgtggtggctcatacctgtaatcctagcactttgggaggccgaggtgggaggattgcttgagctcaggagtttgaaaacagcctgggtaacatagcgagaccccgtctctacaaacaaaaataataattacctgggcatggtgccgtgtacctgtagtcccagctaccagggaggctgaggaggaaggatcgcttgagtctgggaggccaaggctgcactaagtggtgattggaccactactctacagcctgggtgacagaacaagaccttgactctaaataaataaataaatctcaaacataatttccttcccaattatctcaggggaatagattagggtcagataaagaattggtgtgtcttgactttatgaaaagattgttgcagtgagttttttctttgttttagcacctatcacatagctagccttgtgcagggatatagtggcctgggatgcagtccttctattgaatgcttactacctatgagcttctgtgctattcagatctccaatgtcctcaacttgttttagagaaattcaagaaataggcattatcatccccactttgcagatgagaaaaaaatgaatctgatagagagatgctgcctcttgtccagagtaacattgtagttactgaaaaaaataagattcaaaccctactctagcttattccaaaagccagagctcctaatactgtgtgatcttgcattccaaatcttaacatccacagaattaaaacaattcgttaaagtacataatcagaattttcagtgtactttagatttttaaatatgtttaataaaattattttcagctggacatgatggttcacacctgtaatcccagcactctgggaggctgaggcaggatcacttgagcccaggagtttgagaccagcctgggcaacatagtgagaacctgtctctacaaaatttaagaaattaaaaaaactacaggagcatgtagttccagctacttaggaggctgaggcaggaggatcacttgagcacaggaggtcaaggctgcagtgagctatgatcgtaccactgtactccagcctgggcaacagagcaagaccctgtctcaaaaaaaaaaatattttcatcaaagattttgtaccttctagattgtaaaagccttatttacatatcagtaaactcttgagtgcttgtgtcatatattatgtgtttattcttatttactcataacatttgccaagtgatttgcacacaataaatgttgaataaagtcatgggatttaaagattttccttttagagatgaaaatcttttcaacatcatctgatccagtatccgtaatgtgctattaagtaaaaataaggtttagacagattaaacaacttggctgaggtcacagtggtactctaagagccaagactgtcactcaggtttcctgactcccatcttgcagctcctgtaccatacggctatgccacccttaataaggtgagtgattcactggtaaaatcttatgtgaggaaatttttaaataatggggatggactgttcattcatgatgaactgtttaagagaaaactgagactgcacttcattggaatcatagactgagccatccccagctaattgtgagaaaagtagaaacatatagtattaacctttttatgcattcataattttgttagatcagcatggtcatgtacatattgattgataacatgatagaaacagcagaaaatcccactatactaaggagcagaaaaattctgctgctcttggaagcctagacttccatctctctaagttgtggtctgtgattttgatccatttgcctcgttcatgtggcagggcctttactctgaaagagaacagtggagcagtgccggcccagctgctgaaggggccgggcgagcatcacatactgccacagctgagggacattagtgaattacagactgcccactgcttttctgggatcatcacaatttaccaaacattcagagagaagcataaagtcactggaaaccacacatgctttgatgacacacagataagcaccatacattagaaagattccttttgaactacatagaatgcgagaaaaacattttttgtatgctagctcaaatctcagccattcttgaattttgggggtgaggagtggagacagaaacacatcatgcaaacactaagatgctttaggattccatatttaagctattcatatttttcctgtttctgtgaaatttattcttaacagaaaatttataatctgaggaagccatataaataaatcctattagcatagtttttattcactgtaattgtatttagcatacaggaaatagatcttaaagatacacatttaagggaggaattgccacctttgggtttaggaactcaatgccacctgcaagttgtgaaataaaggtacgacatgacagaggaattgaagatatcttgtgaaattgaggacaaatattaacatacctgtttagccaggaaggaataaaatgggaataccaggggctatacattaagtatgtgtttttaaagtcattttagaagtctttgtttttgatgtggcctattttcattaccctgttcctattgaccaaaattttcaggctattcaatgaaagtttatatgtctcctccaccggcccccctggaatattctcttacattattccttaatttgacagctgataaagtctgacaattttagatcatgacatttaaccaaagtgttcttacatgtaacttttgaaatgctttcaccacgatggagtgagctttagaacaggattaatgagcagttctgtgaagggggagctcaggctgcgtggactatttttccattcatatttttatttaaaatacctgtcatctctgatatttcatattgggtgtgtacactgaaatgctgagtaaagcagagagtctgtcatgtcctcttttttttttagaataaagagaaccgaaagacccatcctgtaaacctgtgtaacgggtgatccgcataacagccagataggtgggatcagatgacacaaatgcgttccatatttacactgcagtttccagaataaggttgacactcctttaatttcaaacctctgatagtatggtccttcttcattcagatagaatctcacattaaaatatatcacacagacaatgcactcttgactttaaagataaccaaatgcagaattagacttcatctgttgggactaccagatcaattgctttgacttcattgcctggtcaattcagtccaatagctagcttaaatgatttttttttctgcctgctgaatttgccagctacttcacttactgtgtaactgtggagctaccaccatgtccaggggctgtaccgggcactttggggagttacacagaattgtcaggcatgtttcaaatctgtgcagagttcataatataaaactaattagtaaggcctggcaaaatgtgatttagtattaagggcctggaataaatggggtttgctgttgattatttttgtttcactagaagtcaatgagtgctatcgtagttaagagaataccatgtgggaagacaagaattgaacagagaggagggaggagactgcaccaatggggaaagggctagaggagaaaccttagcaaaatactagaataaaataaaggaacagacctttagggaccagcttggaaattagcctgacttcaggagcattggtgttgaaaagagtgagttgaaaattagggaactagattatggagggcctagaatcttaagccaaggtgtttagagtttttcctagaggtggtagagaaggctacttttaagtagggcaaccaggaaataaagttggtgctttgggaagatgactatgatgacggtgaattgagtagactagaggagggacacaaggtttctccctatgccttgaccatctctctaccctcacacacacagcccccaacttttgcactgtggatgccataccctccaggtcactgcagagccctgacctcagagctgtagaattatccacattctgcagtcctgtgctcagactgccagacaccaatggagagaatccctcaggtgcgcacactgatgcctcttcaaaagtgctggcttttccagcttccactgaactcagtgggcaataggttcacatgtctttgattcacttccttcccccttaccctatagcttctcttctagacccaccacccagcaccaaagcaccaacctttatcatttttatgactataggaagtttgctgattcccccaaattcacaaggccatttgttgacatgggggaaggatgacgtgtggctaggcctcttggcttgaagcagcaacctgctggtagtttatctcattttcccttcactttgcttttttttatgagaagcgtctttggtcagaagaagcatttattgtacatataatagaggagccggcagggctagttgtttttgtatttgttacctcatttagtcttcttgtcagtgctgtgaagtagatattttaatatacccattttacagatgatgtacttattcagtccagggtggccacaggacacagcataagggtaaggggaaactatccacttgtcactgtggcatgaaccctgaagatctgtcaactgaccactcccacactcaagtgcacacatgattgtatctcttcattctgggtgtgtgtgtgtgtgtgtgtgtgtgtgtgtgtctatctgtctgtctccctctcttagcttctcactaaacatttccatgaaaagaaccggagaagggatggaagcgagaacttagaggtaatggtgagtttgctatgatcctgcttatgttggtttccaatggcaaggggtcccagcagcacacagctggggacagactggacttctctggattctaggaggacactgtaactcttgtcctgcagaagccagaccctttctcttagcacctagggagaagtatatccacggggagggcagacaggtgcccagagccatgaactacagcaggagtaacaccttccctattattgtatttctcatgacacagcccagctctttgggcagcagaatcactaccacacatatttatgtttcagatgcaatcctcagtagttcacgagcctggttcagcagtgtgttgccaatcccacacctgtgaagttggtcatttttgtgcccacacataagacttcttatttagctgagtttgatctttctgataactctgtagatgttagttctgttttgtaatatggctgctctcccttacaatttttataaccacaccaactgataactgtgcctcctgtatcttcattcaaaccattattaatattgaataaaacagctgaaagctaagtattataacatatcactaaaatcttctctcaaagatgcaatctaaccattcatccaaagccactgagtttagtcacattactgattcagtaatccaagtaaccacagtatggtcactcctctcccccgtgtattgtctccaaaggttagctgtcctgaaagacatccacaactacccagcctgtcacttaagttctcagacccgccttctcacttgtaaatacctgtatcaaccacttcatagggatattctggagcagatgcaaagggcatgaaataacacaggaaagcctggctttcaacctagaccttgggctctgcacccagttcttcctctgtagcgtgccttccagatctaggaggggctgcccaggagatggacattccttttccctggctgactgcttgtcagagatgttgcctgggaaatctttgccaactccagcattctgtgattttattgattttcccaaacttgatttcattttgtgtagaattattcaattaatgtaacattttgattgtttacagccttgcagtatcatcaatccctattcatccacattgatggatgaaaagaagcatcacagggtatctacatgtagtttaattggcttttgtattgtttaaaacttgacttaaaatttgggtttataatctgaattttacaataagtattaagcagtctagccccagcactactcacacagtaaacatttctttcactgaatttgcagttagccaagtttaatccagaaaagaaactggccaactgcccatcttgctttctcgcaaaacacctctttccagctcctactgggacccaagagcatcgggctcttccatggcagggaggtggggagatgcccaccgatgccttctgcttgtgcattgttcaatatgtgtgtgttctctcagctcacatctttctttttagtgttaaacatccaaggaaaactctccatagttctgtcttctgagcccctgcttcgtctctaccctccgtatgggaaaaagaagagagacagttatactatcagtcagagatttaagcagtgtaacagtcacaaagacttataagcagaatttcctttaacaatgaagagaatgcctacataatttttattttcagctacaagttaaaataatggttcttagatcaattatagagatacctgtaaactttttgagaattttcagtaaacacaatccagtttacatataaagcacatatactcatttaattggagtaggataagtgttcatatgtcttcaaatacatatttaaatttaaaaatatttaactcgggaaactataattgtattccatactgagtaacaaaatactccttgtatacagttaatgggcagatcacgtgccacattttagtaaaagtcttgatactgttcccagtggattatatataatataaaggaagcttggaaacaagaatattgatattttcatgtagtagaggtggggagtgaatatagcatcactctcctatcatgaccctggcattctcggagtttgggaagatttatttcattgtgtgcctcgtcttacaaatagcctggacaacatcatgctatcccttctttatataaacagaattagtatcagttaatagaatttttggcattagtactaaataactgttggtggagcatgctgtttagtagattggttctaaaagtactaaactggggtaaaccagtggtactaaggatatttcaaatgaaaaataatatacaaacaaaaaataattttgtcattctcagtacttgtgacaattttatagacaggagtgaatcttgccttcctttcagatatacaaccttacagtcttttaatatggctttataaataaatacttaactatttttaggaaaaatttgaaaatattcagcacaatattcgttcttacctcattctgagctttgtgatatgtattcagtactagttcttgataatttgttaacaaggcgtttttaacactttggacagatgcacatactgttttcaatcttcacggttaattattccattttgtatttgatgccagaacaccctgactcctaatcactgcccattgttgcaagtccattatattctaactgtttgagtgctcccattgaccttgaactgacattataagctgtgtctaatcttttcagtccatatttctaatgcttcttttctttttttccctttttctgatccctgtttagcatcacaatggggttgcctctgagcccagcagctgactcggcccgctctgcgaggcatgccctctcgctcattgccaccgccagaccacccgccttcatcaccaccatagccaaagaggtgagcggaacttctcagtgtgctccatcttctcatttagaggaattatttgatactataagctgagggttcatatccacaaatcccctttacagtttattctagaacaatgcaagttaataatttagtactgaaatgaacacatgtgtctgtgtgcatgtacactgaattccacggtgtggtgcattcattacttctgcttctgtattcatttctgttctcaaagttaattcacttataaatatttgacaatcatttttcaatctgaattacagcaggcatatgaaaactcaaatacattaaaggtgttcacacttttcacatgtaagtacctacttgtcatcaaaactaaacttcttatttagtactggctctctaactgtaaacgaaaaatgtaagtcataaacttgctaattgtttttcctattacttgtcacagataaagacttgaatgccagttgattcccacattcttagtgttcaaactaattgcccacatctaactggaaaactagtaaagaacaatgagccaattataggaactttcctataggtcttagtaggaggaagaaaaggaaaggatgatcagctcttaaattttttttaaaggtttattccatttcagcatgaataatgggcagactcagtgtccatggggtatgggctctgtctgagttgtttttcctgtagctatgatgaatttttaaagtaataaattacctctgagtctattcagataaactgaaacctactgggcctatgtctgccccagagctatccctaataggcatgctgtaaatatttgtgccatgcatttcgctgggaggggaggaaagaaagtcctaatagcattttgtataggcttatgtgaggcactgaggctttgaattcatatctaaaataaatttgtagacttaagggtgtgcatttttctaatagtgcataatgttatagtaaggttccactagatttaaaatgcacatatgtatgtatttattttgtaggtattatatagttttatataatgtgtgcatatatatatatgagcataaatggccaattttattagtcttggaaggttttttttgccagtttttcccatcagtggaatatgcacaggtcataatattgaatatagtgaataagcctcacattagtctgacaggtccttgtattaattgtgttttcaaacttcatttgcaccatttacatatgagtatttttttaaaaatgaactgttagaatacccatgctttgaattcattctactccagcttttggctggaaagataattttaaagtaacagtccacatttattacctttaaaaagaagttttcagcctggtactgtggcatgtgcctgtagtcctagctgtttgggaggctgaggcaggaggatggcttaagcctaggagtttgagtctagcctgggcaacatagtgaagtgaaaccctatctgtaaatattatataataaaaaataaataaataaaaataaatgaaacaacacacacaagttttccacttcattgttcaatcttagagtattagagtaaaatactaaagtatttcttattattatctctgacctctaccccgtttctatgcctactaccttatggctcttcccgggctagtccagggcctgttaatattctttctcctctgaactataaagcttacgattgtatagggaaaatcacactgaatgtatattatttgccatgctcattatttttggaggcatgttcatatggattttccaacttaattgtaaagcacttagagaataatttctgggacacagtgagtgtggttaaagtcttatttgcagttgatcctcaaacagtaagggagttaggggcactgatccccctagcagtcaaaaacccacaaataatatttgactgctccaaaacttaactactcttagcccactgttgaccaaaagtcttactgataacataaacaattaacacatattttgtatgttatatatattatatactgtagtcttactataaagtaaactagagaaaagaaaatgtgaagaaactcataaggaagtgaaaatctatgtcctattcattaagtgaaagtggatcatcataaaggtcttcatccttgtcatctccacattgagtagactgagggggaggaagtggaggggattagtcttgctaatcagaggctcagaggcagaagaaaatctgagtataagtcgggtcatgcatttcaaacccatgttgttcatgggtcagctgcactatcattacttgagagcaaggatcgtatcttttacttcctgggcatctgccaacttctgtctacttcagttccaaatgtaccaaattcacaagtcctcaatatgtttctttttaaacatgtcatgatagtgttgtattaacgtctcatataatgttcaggaacttacagaattctattaggcaatacctattgagtttttattatactaagtattgtttttgtaaacaaaagtattttctgactcacccacaagaagtttatttttttctatagtattagaaagtaaaaaataaaccatggctagaaatgtaaaactatatcagtgtcaatcatatctacagcatagaaatgttttgtaggtacacagacatacggctcttgcagcaaatacccaatcacagcagaatatgcacacaacaactcttgcacgagctaaaggggaaattttgagagtcattgaaattcttattgaaaagatgcccacagatgttgtggatcttctcgtggaggtaagaatatcctgttttaaatgatccatcagcaacctaaattaaatattctaatgaagtaatataaatcagtatctttatttccagcatctctaaaagagatgaagggtgagagagaaagaatgagtgtgtgtgtgtgtgtgtgtgtgtgtgtgtgtgtaagagagagataactaaaattaacttttgtgccatttctggaagacttatttaaatttcctcaaaaatcaaaacgattttcaagttcattcaccattcacatggaattggtctgtaatatgtaaaggtctgtaatatgtaaaggttatgttccctttgacatctttcattataaataaaatatataatgtgttgaataatgtattatgtacataaatatgaattgactttaaactaaacaagtctgttgtctttattttattgcactgtcctttaaatttcttttcacagataagagaaaggatagactgtagtatacacatggcttaaattgcttttgtttttattttaaatactaaaataaagctatatagactttctatgggcaaatgaggcctaaattaatcatttacattttggaaaattaagtatttgaaattaattttaaatctgttcttttctgtcaaaggttatggacatcattatgtactgccttgaaggatctttagttaaaaagaaaggtcttcaagaatgtttcccagccatctgcaggtaaagaagccttcaagagcatgcagaataaataattttcagtaacaaataattttaaaaatttttggcatggtgttagtagtcttggtcaattagaaatccagttatttattaatgtctgcttactttctaaaacaatatgggcaggttacagttaaaaacaaaaatatagtagagttagctatttgaaattgggtgatgaagatattttgctcaaaccttagaaaaaatgagtaagagagaacattcattgaatatgtctgtattcttatattcattactctaattattatttacattatacaattgagttaggaagcttctggctttggaaagaaaatgttcttttctgccagcagacatctttgtgccacgctttcactgataaagtttatttttaataccaaggccagtctttgcattacgttctcttaagtataggtgttttccttatgagaaagcaggaaaagaagccaagaaaagttaaaactttcataaacaatgttgcatttgctaagtataactataaattatatatatacataatttaataattatatagcatataattattatagcatgaaggggtatttttagagccaaagtgtagtaacgttatgtttatttttctttcaaagctgttttaagcttggttctcaaaatgcttatagattgaggtacatcttgttaaaaaaggtttaatctccatgcggtcgttagaaatagtatttaaatctgttgaagataattgtttttgtagaaaacagaacaaccagttattcatagttatataacatttttctttttaagacaagttcaatgatattctatttttgctcatttttatgaatacattgtagtagaaagcttcattttagactacagctttcctgagagcaatggcattacctgctatgcaaatgtatttcagcacgtgattgtactctatgagccttcgcatatctttttctgtatttacaatagaccttgtatcctatctctttattttgcagtttctgattcatgcatcccaaaatttaaaaacataaacacaaattttaaaaaaattatactgtagcatacctgtttacagatgcatattttcttgtgatggggtttggcaaattagaatacagccgtgttttaacattatgccgtgtgtttggtttatggtcttcttcttaagaattgtatatattaaatcttatgcacaattaattgattttaagaatacaggtagttgttatttttccagttgactattttcaatgggaatgtctaagcgaaaatgtacttttgcctgtcacttcctggaggtgatgaggaagcagttttattagggcttattttactgaattttaacagtgctccttatagcaccagccactggcatgtaaagaagcttcctggagttaacatgaaagtgctcaatgtttaaaggatctgtttttcccctctgctggaagcctacctcctccacaagccatatactcaatccctaaaaccaccttagtctgctgcatatgcacttttgtttcctattatgtggtcagtgaagagtcagggttctgctagaatgctaaggaggcgtgtgtcttaactgaaggctcagtataaattttttctgatttggcggaaaggagttctattttgtttatcaatttaataacatttattgaacacctactgtgtatcaagtactagccaggccctggggaaacaatgatgaataagatgatatcctcacggggcacaggagaggtaattatacagacagatgattccagcttcttcctatgctggagtagaattacataccagggactgaggtaggcaataaatggagtgcttaattctgggtatgggagtctgaaaaagtttcacaaaggagaaggcataataataataataataataacctgtgaaaaatgccttaataaaagtgtctgccaaatggaaagagggattttccctctgagggagttgtggtgatggaaaagtggtggtggattctggaagcttcacagaagagttgatggggtgggctttgcaggataattaggggtgtgtcatcttgaattgcagagggaaccaggctggcaaatgtttggcagcacagcagtgtacagcaagtttggtaaatgctgtgtagtagagtggctagaacataggttgaggataggagtctagtatagtgcccgagtatagagggctttgaatttcataggaaagagtttgactattacagcaggtccttgaataatgtcatttcattcaacatcatttcatcataatgttgaagagaaaaaaataattctcagctggggtcactgtctatgtggcctttacactttctcctcaggtccatgtgggttttctctgggtactctggtttcctcccacatcccaaagatgtgcccattaggtgaactagcatttctaaatggtccccatctgagcgagagtgtctggcgtgtgcacacgcactctgccatggaatggcatcctatccagggctggttctgcctagtgccctgagtcgctgggagagactccagccatccatgatcctgaactagaataagtgggtaaataatgatcttacctgtttttgtcactggtaggtggagttctttccctgctttgttatcagtcgcaaagcaggaaaaagtcaagcagggtttactcctggccaggcctggagaaggaaagaactcttggtctaaagacgccctctccccgacaaatagaaggcatggtgcgtttaaggaccgggtatggggagggagagggatgttagcatgcacagggtgggaccccagatgcacaggctcagtgcataaacatacatcttcatgcaacccatgacacaaaatggcgaggtgttcttttgggggagggaattttagcattataatgataatattaaggatctaaaggcaactaggggtcacttgttccagtttgtgccagttggggatcttatctccctctggtatctggtcaggaatggagaagctctggtgctactgggctgtctggtttctttatgcagctgtgcctacaaataaagggcataaataaagaaaaacagtaagaaaaagaacttttccaattatttcatcagggtggtcctggtaacatttttattaatctttcttaaatgtatgtagatctcaactttatttcagtgtttaacattggaagtgttttgggtctttctgagtttggtgatgtttttgtgaccagaaatgtgccatagaaacataactatttatttatatcaattagcctgtggtacaactggtttcattataggtcagttttcaagaacatattaaatcctcacgttaagtaaggacttactgtatttgataggcaatagaaagtcagaaaaagttaagcaaaaatgtgtaattcttctaccagaacatagttgataacacaaaattttatgaaacatcagatttataacaaagttattaagttatgtagatattattaagattatgaaaataaagtccacataggcccatttatttgtgagtcagcacataaacatagaagaatgattaacaatataagcttgtagcttatgctaaatgtgagctgcaatagatgataaattatagaggacttcagagaacactaagcttgcatgggatctcagaagtttcacaggtcaatgccactccatctgttggctgatttttactaggttaatatatgaacaacaacaaaggtaacatatcagtaggagttaaaattattttattgaatatctgccatgtctgtaccgttggattctactaggtgccttacagcacttttgagtcttctatgtacaaaatgcctttcatgaaataggaaactccaaagtcaatggcatgaatatctgtggttcagatatgtgatgtttgtttttaaaatctttatatagttttgtattctttttttttttgtttccttccttttaccttttttaaaatgtgctctgggttttatcttagactaacctctttaatgttgccttatgtcagcattcggttgctgtggttgacagatcacaaaatggtgtgaaacttcattagtgttcttcataaatgaaatatttatggatgcatctagaaaagtgcttatgatttgggtattcacacaatattatttttccatggatctctctaagaataatgtgaaaatccaaaatgtatacaaaatattagctaatatgtatttcaaagtaatatataagtaaaaaactaccagatgacattattgctttcatatctgtaaaaaagtaataaataatttttagtcagcattgtaaacatgatcttcacatctaaagctgtattaatttaattaagagctaactaatatagtatcctgaagtcattgagtatttaaaaacagaatgtattctgacttgtggtaaacataaaattattctctgtgagtccaaagataaaatagcattatatatagaatgctgaataatcctgagtttgggttttttggttttattttgttatttagtttttttcaccttcaccagtgggcttgtagggtttttttgtatgttttgtgggtttttttttttttttttttttttttgagatggagtctcactcccttgccaggctggagtgcagtggcgcaatctcggctcactgcaacctctgcctcccaggttcaagcagttctcctgcctcagcctcccaagtagctgggacttcaggtgtgagccaccacgcccagctcatttttgtattcttttttcagttgagatggggtttcaccatgttggccaggatggtgttgatctcttgacctcatgatctgcctggctcgtcctcccaaagtgctgggattataggcgtgagccactgcgcccagccagtcttgtagttctcatgtgcacctgggttttcatttttaggttcaggattttaaaactttaacgtggtaatttctctaagattttctttattttgatagttatttatcaggttgcaaattaaaatttccattttattaaagtcccgtttattaatgatttcataatgacttaatatataatttaatgagtggtacattcagtcaccaaattacaatgttaactgaatttctttgttctgtgataactttcttcaaaacatatttaaaatttgagctataaactgtgaatccattgaaagcatctatacaaaaaatttagttttaaaaattttgttcatataatagcttttctatcagctgttaaaacttccgatgtcatctgtttgaaaacagaaatggtttagagcgcataccagtaaaatttgatagacattctttctatatcactgactgaatctcgcttgttgatattaaaacatgggattatagcaatgcataattaataatatatttttcatttatatcgcactttgcagattaaatgttttcaaacctattaattcacaagcaaattaaagaagacactatgtaaatgtaaacatttttggagaattagatagtgatatttatagtgatatttattagttcagtgactaataaagttctaactccaagataaaacccaaaccttcttattcatcattgattattttttatatctagcttttaacctgtatgtatttatccatctgtgtatgcatgtacacatacatacacacatacttaaaacatccacttaccctgttccgtaaaggagtttaagcagctttgaaagtgatcatcaaatgtaaaaatagtgaggaaattgaggcaaaggaagaataggagtaggaaagcaagacaaggccaacatgagaatagaagtcctctgtatttgccagaggtgagccatacatttgtgtctaaactttttaggggccaacgtgcaaagaagagttgacttttctgaacagtcacactgttcaactcttctattatgcaattcgtgtccaactctataaaaatctatcctatgaacagtgtgactgccctagaatagtctgtagctgtctgtaggactgaggtcagcatgaaattgcaggttctcatagagaagacataaaatatgtgtgtagtttataaaccaggtagttttagagattccgtgactgtcaagaacatgctaggaaggagctcacacaactgaatattaaataaggtacattcagtgcctagtagctgagagaactgaggacacagataggaaggtgaaatttagaaacatgcagagtacttgctccctgtcaggcactggggagaagaatgatctcagagtactgttcccagactaccttcaagagaatgacctgatttctaggatccacatgacagccactacagctgactttcctgaagcctggcaatttcatagcctcccccggtgattcttatgaacactaaactttgaaaaccaagtactctagtaatccaaaatcaagaaaaacaaaacctgagtcattgttctctgtggccatgttgtgttatgtaaaaccttaagtccttggatgtttattcatttatatattgaataaactcagaatttctaaggaaatgcctgaagatattccttcatcccatgcattccagagatacaccatgagcttttaaagacttgatcttagtgccacagaatgcctgctgatgactttaagtgcaaactttcattaatcaggttttatctaaaactcagctgagaaacacagagcactaagaagctagtttagaatacatgtggtccatttattcctcagagtattctagtttacatccctagattgggtgaaaccatccaagagctgcatgtttggcctaggctgtctgttctcctccggggtttccttgcccatgttcctcttcagcattaggcctgccatttgcatggagccacctttcaagggagtgcataagaacatggtggccccgttatcgcagggctgtcatgttgatgtcactcagtacattgtttagtgtcccttctacgaagactcaatcgagacatttcttttaaatctagatgacagcccgtttttgttttcctaaggaacctagaatgtgggttttgtttgtttgtgtttgtttgtttgtttttctcgtataaccggtgttaattttaaaatttgccttgggcattaagcagttcaaagccaaagtccctgcttatgtctaggaagttatggcttttgtctcctgtattccttccctcataatcataccttcagctttgtcttttttgtctttttactgtattctagaagcttccctaagtcctttatgttatgtatgtgtgtgtatgtattatgtatgtgtatatgtacctaagtacatatatgtgtgtgtgtatatgaaatacacggttttatttcaaaagccatgaaagtaaaaatcattgtgagaatattatcagctatgattattttctacaataaaaaagacattttttgtattaactgaaatactttagctcttcctggagttgtttacgtagctatagatatttttctgtaataaatccagtaaaagttgtaaaaatcacacactattaactagctgtattaatgttatagtcatagctttaaatatttcctaataattcacatttcactttctgggatattaataatatagtgtcatctactaataatacaagaaaattacttagatttcagtgcccttgaaaaaatgtagcacacacatccttcaaaacacagttatacaaaatagttctcctgtcagatgttttatcactgtaacaaatatggctgtattattttataggaatcaaactgcatccattttaaatcacaaacgtattagccacaagactgctgcagcactgaattagttttatgtttataaatgagcagaataggaagcacaataaggtaacatttaagaaatgaatctctgttggttctttcccagctgggccttggctttgccttcatacgtctcctcggtgatcttcaaaaaggcatcatctagcactctagataattattgttagagggttctgagtaatttacatttaattgcctggactataaataatacagcatcctcagttaaaaataccctagacgccaagaaagtagaactgactcctttcaaggcttgggaggataaacatcactgaaatttcttcagaattccttgttaaaattcctttgcaagttgccacgttactgaactcagatccccttgtgaagtccctcacgcagaagaccaatcaacacggagtgtgccatgcttgactcagttggattatgtgtcttcctttggtcactggatcaatgctgactggtgttacactacttagtgtgctgcagcatcatgaaacgtgaaggcgtagagcagtacttgcggtgtgttctgcacagatgctactgagtccagagaaaagcactctagaatctgtatgtgtgatacgcacatgttccaaaaggaatgcttgttttttatttggcaaaagtattctttactaatgtcagaatagagaggtttaagctcttggaagctactatcaaggctccgttagaaatgaagataaaatacttctacaaatataatgtactttgtaagtttacggtgattgtattatgatcttgaggtctggtagtggcgtaatgcatgacaaataaaggattagggtttttttttaatgaaattgtaagtcataagagattttaggatttcttcagagcaaaaattagatatgcctctagacgtgatttttggtcacttaaaactgcacagtcgtacattatatgcacgactgcacattataagtagcttaaaactgcacattataagtagcttgaggaaaggggctttccccttcatttcttttatagcaactagtagaggactccaactagccaaagaccatatgtcccagcattcccagataggtccttatttcactcacttttattgttttaagttaaggcagtttatttgatgtataaccaagaatgatttaattttatggttttcaaagacttgtcaaataaattcacagattcaaaaaaaaaaaagatcctttgttgggctctgtcccaatttttagtttaaaaaaatatacgccctcaatgtagccactcagttcagtaactgtgcttgaataatgacactagctatggcgcttcatgtgtttagtccttaatttcatcctaataaatggcatcagttctttcgcttaagcagtgaccttactgcattatttttatagaattacaagttgtaaaattttgattctataaaagaccttctgttatgacttactgcctcctgtccttcattttaaaaacaggcaaactgatgagctttttttgtgctgacaatcagaccaaagtgaagcccagctttcctgaacagatctcatccctgctctgtgctcttcagagtggggtgtgcactcttacacaggcttacacgtgtcaggggcacacatggagttcagccatctcatcagaggatgagctgaccattgctgagttccaagcccaggcctcttcctctccatccttcatctcattttctctctatggcatctctttctcagcctggaagtgtattttgttctcttgtaaaaacccttccttctctctgcatcttctccacctactgtccagtccatccttctccaggacaaggagtttacacttcatccagtttgtcacctctcccactctcttcatctactggaatctgatttttgcccccactggttttctaaagtctctctctctctctctctctctctctttccctttggctacaagcaatctttgattacgaaatgcttttcagtctttaaagtagtggttctcaaactttttggtctcaggatctcatcaaaattgaagacctgagtttttgtttatgaaggttgtatctatattttcatcttttaaaaattaaaactgagcattttaaaaatattgatttatttaaaataaactcattttgcattgatgtagaaatattttatgaaaaatactttccaaaatgaacaaatattgagaaaagtagccttgctttacatttgtcagatctctttactgtctagaagacaggtggaatttaatatctatgcatgtctttcatctgttgcagtatattgttttggttggaatatatggtcagaatttaaaaatctgcttgcgcagacgtgtagttgaaaagtgaggaatgttttaatagccttttcaggtaattttgtatcttcttgggcactacaccaaaactcaacatgtgattgttttttaaaggttagttgcagtatggaatctgcagtcacatgaactttactgttatattaaatccaccagtgtatcttgcactttgaatgggtctttcacctgcctgtgattttgtaacattatgcactggtcttcggagaatgttggtccactgagttatgttgtctctccatatatggtcactttgcatttaacaatattaaaatagcacatttgctaatattactgctgatctcctcaaaaaagttagttttgagaagccagatacaggcttccaaaattcttatttttacttaaaagcttgaatttatcgttggcaataaatcttgtcagttgttttcctggaaaggcttaactttgttcatattcaagaaagtatctcccaaataactgtagtttttctctcagttatgctttcaagtaaatggtgttcgatgagaaaagcagctagttcattttgcaagtcaatctgacgagtgtttttctccaagacaaccatgagatttcagtatacagaagtgctttgtgtgtactttccactttgtcacactgaatattgaaacaatgtgtactcaagggttgaaatttaattgattaataactttttcatcatggatattctgaagtgaaactgttctgttgttttgctcactgccagcgtggcagtgaagaatatagcaactgctaaactagtacgtgtcagtgcccctgccttgattcgggttaaagtgccagcagttttacccaccattgcttttgcaccatcagtgcaaagtcaacacgatgaaaaggtcaaataatacctcagtatttttatgaaaattgttttgatctcatagacttctcaaaggaaaggcatctgcaaaccacagtttgagaaccactgatgtagtgaaatccttttgcacagaatcatgaaacatattttttctttcttaaaactcgttattttctgcatctcccatatcccaaagtgataacctttcctacaatccagtacctggagagaaggtaggctagatttcaggaaaactaaggctacgtttcctgtagctcaatagaaatcctgaaacttctacttattttaaaggaccattaacttttcttgggattcctgactgtcctcaaattccagtgccactgattccagaaggggacctccttaaggaaccatgggcatttgatgttaaatcaccatggtacataatacttggtagcaaatctgcctattgttttgaggtcatgttatagatgacgtcctcttaaatgtgtcaggcttgcattcttgaagtgccattctcaaattctgtaggctcagggcccattagtcttttttcttttcctttaataaggccaagcttattcctacctcagaacttttgttgttgctatttcctctgcctagaaggcacctcctccagatattgacgaagccagcttggtctcaccgttcaggtcaacctcctctgacctccctatgtataatagcctcctcgccatcactctcacattattacccttttagcttcacagaattctataatcttcactcctcttgtttatcctttttttactcattaggcccttaagaacagggaacttctctgataatttcctattatagtcccagcaaccttaactgttgaatgatgaatgcagagaccctgtgcctgcactgaggattaaagagcctgctcctagaacagagagccagggcgcacactcccgtacctcttcctcacaccctcttcctcacctttgttaccttggctttcccttctctagttgacagttacctctccccatcctaaatgtcatctcatctgtcgattctaaggttatcttacagtttcttctcagcaaccctaagcatttgtgtttagcttgcttttgtgtctttgaaacaaaattctcaaagatacagaatatatataattccctaaaatatggaatttatatatgaaatcttaagatatatacacacgtgatgtatatatcttaagctacatatatactgtatatctgtattatatcttaagatatttatatgcacactatatgtatatacacatgcacatatacatatatgcatatatacactatgtatatagtctgctttttcaaagatttaagactctaagtgaataattttcaacctctttaatcttaggacccctttaaactcttaaaaattattgaagagcccaaagaacatttgtttacagtgagttataactatcaatatttgccatattagaaatttaaactgagaaattttaaaattatttattttgtttaaaaacccattatatgttaacataaaaatacttttatgaaaaatgatgtttgccaacctctttgatgtctggcttaacataagtcagctgaattatcttatccgcttccacctgtgatatctcagatcatgtaaaatctggaaaactcagctatgcatttgtgagaaaatgagagtgaaaagggcaaataacatcctggtgtcagtgtggacacttgagaagcactgctctcagctgtccctgtgggactgcctctggtgagacagcgaattccaggtggtgagggctcccgcctttgccacacccagctgtgcagtctggagcacatcactcgacttcagtttcctcctgtatgaaacaaggggctcttgtgcctgctaaccttggcaacattcaactccaaaatattaaaatttttgcgtagcagctacttttctcgtgactgacttacaaatatatgattaccaaccattgtcttacaatactgaaacatgttaaaatatatacatcttaatgcagggctatatgaatgctgcagcttctttgatgccttcctaaaaattctttgaaataattactctcaaacgtaatcctacactaagactatttaatgaacaaagaactcaattaatatggaaagtaaatcacatgttttaagaaaaacaaggagttcctattttgtttaatgctatttttgtatctgatgaagttttatggagaaaaacgtttaagtggaaaccaaacggatagttttttaaaagcatattacctctcttacattcagacaatggaatatttttcagcactattaaaaaattagctgtcaagccatgaaaagacatggagaaatgcatattactaaatgcatattactaaatgcaagaaatcaatctggaaaggctatctattatatgatccccagctatatgacatcctggaaatggcaaaactatagtcagaaaaagattagtggttgccagaggtcgggggagaaaggattttcagggtagtgacactatgttatatgatacatatgatactctaatggtagatgtatgccattatacatttgtcaaaatccatagaatgtacaaaaccaagagtgaacgctaatgtgaatgatatgtaaatttatcagaaagctgtcaccctggtggaggatattgatagtgggggaggctgtgtgtatgcagaggtaggagtaatataggaactctctcctcattttgctttgattttaaaacatctctaaaaaataaaccgtatttttaaaaaagcatatcatccactcagtatacttattaaagagatgaaaaatcaatagaaacttcagtcatatttaatgttgatatttataacactatatggtgtttatctttagaactgaaaataaaaatgaaaatattttaactgactggtttttaacatataaatggctaatcttagtacccaattccaaaattagaaaaaaacaagccactcaacaaataggaatcaaaaaattgaacttgttcaatttaacaaagtaaaataatttttaagcacttgtgtgacttctctgaaaatttccaattcattcaattcttcgtttgtctgtgctgtgtgctatgctgggcctgtcaggcagtccctgccctaaagggccttaaagttggcttggcagagacagagagatcaatcagtgagctgtcacaaacactatgagaaaagagtgtccaggacacacagaagagacccagtgccatgataagagggacacaaaggagggagctggcagttttgcatagaggaaaggagaactggtagtatttttagcagagttttcaaagatgagtagatgtttgtcaggcagatatatccttctgactccaaaatctatgcttatttttatatataagaatgactctcattgaacgaaatactaattaaacactattgtgaatcgctgactaatgaatcaatgattactttgcaaaaattacagtgtgtattcttttacattgcatatttcatggcaaagaatgaagaaattctcaagcactatgtgcatagaactgaacaatgcatgtaatgactcaactactttggctttccagtagatattaaagacattagtagtggcatggagggtactaactttaaaggacttgggatataattttctctaatttacttaagatgttacttctatattcacaagtagaaatccctctaaaatcattgacattaaaatttaaagtgtttaatactgtttttgctggatttaactgattaacttttagttgacctttgtcggaagttatgttggtatttacatagaataatatgctttatattaaaacactcattcacttgtgtcctctaaatgaaattatttcttactaacagttgcctctattaaatgtagagaactgtggcataccatacagccattaaaaagattgaggtaagccatttctactgacatggaaagatgttagcaaaagagaaattttaaaagaagctagcaatattgcagaagagtatgtaaaataaaatcatttttaaaaaagaaaactatatgtgaagatcaatattcatacctatacaggtatatatatgaagagaaaaagatctggaaagacacaccccaagctatgactggtgaatactgggggtgatgggagggaattattggtaaagagttacgttcacttcttaactgtttttctatgataaatcatctgtgtttctcttttcaatgagtgtgtgtttctttaaaattggatatatattagaataatgcaaatgaaagaaatagtaaaaagtgtcattggggaaacgttatagctataacacagataagatttaaaaaattcaaggtaaaataagtgtttaaacttttgaactgaatgaaaaaactaatctagacagaacagttaaaagtctgcattttcagagatagcttaccttttcttaaacttcgttattatgtagacagactgattgattttgcttttcaagtgaaaagctgaatcagctctgttcacctaaatgggcacttaaaatctagtaaggaaatgaacactgtctactttagaacagtgcatgagctcatattttaagaaactcctccaaatctgtggtttgtttttatcccatatggtgattacaataatgggatgtaaagtagcttcagtcctaaattccagtaaaattcttaagttaggtctcattttatagaatacatttcatgataaataattatagatgttacttctatattcacaagtagaactccctctaaaatcattctagtccagtttgtctatcctaaaatctcccagacaggtggctgtcttttaatgctaaagttcttcatattaaaacaaaaaacttgaccttccagcagtattccatttcactgtataacaggaggaatatttaattttcagcctgtttgaaatgctacagaaaagtgtttcagaccaaatccctattatattagcaaatttagatggaagctataaaataatttgcaattattatcaggtttatacttgtaaattgtaagtatttgaaaatatataaatttaaaatattctgagcattcattttccttatgtattagcatgttattagttgacacttatttgccctaggaaaatagcaaattaactacatcttatttaatctctctgtagtatatattcagagatgcagatggatgatgatgatgatgatgatgatgatgatgatgatgatagctgatacggtttgcatgcacctaccagtgtttactatgtgtcaggcactgttttaggtacttctgttgcattaactcatttcaaccacacaatactttaataagtaccattattgttcccctgttccatatcaggacactgagacatagacaagttaatgaacttactcatggttacacaattagtaagtatagatccaggcaataaggaacctgtttctcagccattgtacctcaaaccctagatgtgcatgctatttttccttgcaggattgctgatgcctggatagcccaggaaacatttttgatcttgcttgtaacatgccagctacagtgtgcttgtggcaagtttttcagagggaaatgaactactcagcaggaaatacttattgactatttacagtgtgcaaaaccttgattgggaagtagtgactctcaaatggaattccccagtgtctgtcaccatcccagaataagagatatttcatttggttttttgaactagtgctctccacaggaatgatgcatttctggaaaacattgccccaccctccaccgttcatagcccccaaaactaacaacacagctcgccctgagctgatgccttcaccaaagccaccttgatgtctatgaacctttcaaacatattagcagcatggcagtctgaaattctggagggtgtatgcaaacatgttctagacagtgcctcttcctgaacaaaactgtcccccttgattgtggctatggcatccatgagggctgttgaccaattctctgagaacctacccttgaatcttttaggctgagctcctcaagtttgtggccccgaaagagctctttggcatcttgtcctgtctagccaaggaggttgaggtagttggttgtcactggtaccttcttggggtcaaagtgacatgtacattgctccactgtagaagtcctgttgttctttcctgcagaaccagcttgcctgtgttgtgtaatcaaatctttcctgtggtttattgggaatacctcataggtatttcctttcccatccagtatgcatgatgaataaagggatgcaacatgcagttgattcgattttaaataatttttctttacattaagaatgtaacctacatgcatatcctgcagactgtaaccaagtggatcagtctaaaaagtcactttgtgtaaattaaaacaaaaatgtgatactttttttcctcttattggcaaaaaagtatgaagtttggtaataccaagtaggaacattcttttagtgaaaagtgaaggcaattttgcattgtctactaaaatttaaaatgtacatatgctttgatgcagctttggtgactatcctacaaaaatacctaggtatacaaggatctgtgtacagtataacctaagttcccatcagaaaaagaatggttaaataatataatgcacatacgcagaactacaatgcagatgtgagcaagaatgacatgagatccatgtgtgctgacatgagaggaccatcccatgaagaaagcgaagttgcagaaaagtatgtgtagtatgtacatcacttttgtattaaaggttagaaaatagacgatactttcaaggatcatttctatagtttgttactagagaaattgctctgaatgtgtagagcagcagaaatcacaaagaggaggcgcagcatcctcccctgagcatgttgcttcccttcaactgcgctttgccattactgatggttcttctcttcctctgcgagagtaagagggagaggatgcagtctgaatgggaaaaaaaaaaaaaaaggtagaaaaagctctcttaagatccagatccagtaaatagttaagagtagttactgttagtgggtgtgaaacattttaaatcaatgttaagaattcctaaaaacaactcaataagaattgctcataatacctcggttacttttgaaaatacatatacagatacttaggacagtgcctgatacataatactcagtaaatgttagctgcacatagtagtagttgtggtattattttggggaaaaaaagatagttttattccctatattctcttttgtgtacgcttagatttaagatggtttcatgtgaagctggaggttaatcttggattaattgaagagtgtttcttgttgcattctaatgtccaaggaagtgatatacagcagtaacttaacatcctgagatcattgcaaattgctgaactcatagttaaagtgattttacaggtttctatctttctcccaagtcctaatctgctgagagttgcatgttttctatttcttttttcaaattaacttttaagtttcacacattttctcttatttgcaggccatttttgataaagattaaaagttcatcaatccaagggaaagtataaatagggagtgccaaagttatttagaaactcaggtactgagtgtttggcaaactcccaagcaacatggtgtgcttcaaagtgatttgctgtgccagagtagactcagttcatatttgtgtttcaaactcaaaccatccctctccggggttttgtacaccccactgtgggttgctcctcaatagttgaagtcacaaatacatctcggaagaactggattgtatcactcctccacaataacgtgttctagtaatagttaacaatgattgataaatgattatcttttaattatgttttgccctatttcaataatggcatcaaaatgataccatttttattgaaatttgtgtgtgctaatataaatctttggcaaattcttagagtcattttttttccaggacaacatttatattgaaaatatattttattgtgtatattattatttagactgtttgtatttacctttttgaatttcagctcatgcaatcttttctaattccctaatatataactacatattttttattatgtaactgtcagtctcatgctaaggtacccagactccaggagtctttacagataacttcttgtaaatctacaattgtttgtttccactgaaaatacatttctagaagggtcatgggagagcccatttcttgatttctgccatttttggacagtttttgtttcctttgttgttcatctcaattattactttagaccctataaaatattcattggtcataaaaatccatgtttagcatagatcatacactggataatgggtaagtgtaatgtttcaaacttcactttctgttgcatcctacttgcttggaccatatttatgtattcatgcaaaacacaaagtcccagatggaggataaaaagcaataaataaaaatcattgtttaatatctcaatagtgatggacataataaagaaaaagtaggatattgcgttaaaaataatgggtaaaaggctgttgtgttaaacaaggtggcccataaaagcctcctttgtcaagataactttggaacagagatgtaaatgaagtgagggcacgagcaatggcagttaacaggctgatgagattttcaagcagagggagcagcaactgtcaaaacccccaaatgggaacccctttggcatattcaagaaagtgcaaggagatcactgtgactagagcagcgtgaacagggctgtgaacagaagggaggtgatttattgttgaaaagttactctgactgcatgcggacaatgatgaaagcatggagatcagtgactttcaacttattggatgatgaccacctcagctccagcaagaaatataatttacattattacccatttccacttgattcttctttcactgacttgagtgatgatgtgttctctggcttcacagtttccttgtggtctgcctagcagaggagaactgttgttcaaacatgaatataaaaatggttcttgccaggtcatgggcaactgcctaagtgacatgttatcaacacagtgaactggagaccaagacaccatttccagaaggctcaacacacaataacacttactctgaaacccccaaattttacaggaattttcatcccgtaggaaaaatcggtcatgcaggatctggtcaagattagaaaagtgcagctttaaaaactataacggacccttctcttcaatccattgatcccttcagggcagggagcaagtaatgcatcttgctccttcgtcttgacagaccttacatagaggacttaccatccttcgtcttgacagaccctacatggaggactggctccaggaaagagcagaccaggaggatggtgggctctggaagcctcagcagggattggttcactgcagctggttcccatagtgaatacttgggaagtgactgcgtacataccactgatttcttttgttaagagagccactgctaaaggaataaaaagtttaacaagaaatcctaagattaaaacatgccttatgaccttcactgtccagaattctttaagttattgtttacaagtattagtccagtagtaaattccaaagaatgaaaaatgcagacctgtaatatatatggtcctttcaggaaaagtaacgatttgattccaggaatagatttgatctttctttctaccataaataatggtgtttgtagatgatacagaaggatgagtttgatatccagagcataggaaatgggcaatgtaacaaaacctcttcagattctagtttcactaagtaagattttgtcaacacaagtatatcttaccaatgtattgttttgaagagggttattttgggggtaattattttcagttttgcaaaaggatgttggcaatatagttgttaaatttgtgcaaataataggtaaaacaaaataccactgcaaattatattttcctgtgcctattaacctgcacagaataaatatttgctaaaacatttgttagatattatattctatgtaccataataagacatacattattcatgagtatatgtgtatagatatagatgtagatgtaggcacagttatggacacagtgatgcccaatacttagaccactgtaattatcgagtaacaaaacagtaaattgttttttaaactcttctaaatcattttcattttcaaatgtgagaatggtaggttttgaatgctgattcccactctttctcttaaggtagagtaatattctttggacaagaaaaactttgagaaactagctttttcctaaccacttagtagccagggaagcttcatatgttttaggagctttctatatccttccttctctcaaaccaatgtacaaagaggacagtgccattcatgagcacagaaaatccacccagcaggacacactaaagtggtttccttcctgttactaaaagttaaaaaaaaaaaatgagcattaaccttccactaaaggggaggaggttggttattcagtggggcttagggttgggacaaaaatattgttcagtgtattacttgataataagtaacaaaagtttaaaaatttaatggtttgttttccagatttatgaaatatatatgaatgtcatagtgtctgctaatgccaaatggctttgtcagaatatccctggtttcagaatgctcccacattcaaatatcttgtctctctcagcctctattactagaatatcagaaatgctgtcccatgccctggtatatctacctcaggaaagcattagagaaatgagatttttttttctgtcatgttttgcctcttcctccccccttataaaatataaatattaacagaacagttagtttggtattatggaacccaaggggaaaagacaaagaacgtgtaatagaattggtgcaaaatcctcctaaatatctagggtaggccacttgttcatctgggcaactcacactgagacaataggactagataatgggaaggtatatttgaaactattcgcagatataaaattataccttatttatacttctcataatttttattcttaccttcaggcctcagccatgtagacgtgaaatcagtatggcaatgcacagacaaggaattcaaatacttaacctcatcatgaaaattaatctggaaaaataaaaataaataataaatcaatctcttacaatcttcaaaccatccttgctaaatcctatttttatgcaatgcaatataagtaccaaatatgcttattcacactgctaaaagccatggctatcattagataagctggtaaacatgggaaatcaagggaacttgacaggataactttttctggtggatagttttctaattttattctaaactactgatatgaacttaggcataaattttatgtagtctttttatgattgttctgccagaaacaatcataaatagagtaaatagtgtttactctttaatactataataaaccaggagaacataattacatggaatacgtaagtcttctcatcttttccatttctgctcaaatagaactatttgcatagtagtcaccgtagcaaaattggattttcatatttaatttttttttatttggcccttatttcttgtttcaaaaattcaagggtgcttgtgattgtaagttgtttctgttgaaaataattattaagaggccaaagtgatattctacatcatttttctttcagctaattttcaagaattactaaaatgaaacatttttgaaaaatcataatatatttattatggatatatttatttcaaaatatatatcagagctggctttaacctttgaaatgttgctgtccacttccaagtgcaggtcatctcacctggcttcttgtttttgtttttgttgttaaaatgttcaactcaggttctacatggtcagctattatgagcggaatcacagaatagcagttggagctcgccatggttcagtggccctgtacgacatccggactggaaaatgtcaggtaaataaatcattgtgacttcctctccataaagcgtggaagttattgaaaggagagagagactagcacttcaccagttgacgtgctgagctgctggaacattatggataatgctaaagggatcaatagtttaatgaaggacgcacagaatatagagccctactgtcttcattcactgggactgaagggttgccacagaagagttcataagagagcccagagtaaggtggcactgctaacaaactattttgcaatacatattttcttgttttaaaccgagttttctgatcttatttttgccatgtgttttctgaaaagtttgatgatatgttattatgatataatgattgaacaaaaattaattttctctaagcaaaatgaggtatttcacaattataagacagtgatctagtcagagttcaaaaaagaaaaaatcacaacagcatttattatagttctgtgaaaaggaaatacatgctgtacttgaaatactactttttaaacttttgtaacactttatgcttttataacacttcactgtttgtgaaaaattattgatttagttcctgatcttgatcacctgattctcaatatataccagttgggaagagagggcaaatctaaccccactttagatgtaaaggaattgaaacatagccttaaatcactttatcccagagtcgcactgttacttcacaaaatcggggttaggctccaccatgatcatggtaaatttataatgttgcattggtaaatagttccaagtcatagcttcttatatttctttgtagcatttattaatgtggatatattccatattatcgtattaggaatttccagaaggataggaagaaattcataaggatgtagctaaaatgttaaactgtctgttaaatttaatgaactattaattaattatctaaaagtctggcttctttccatgaagtagttctaagagatggtaacaggtgttgaggtgttgggggtaaaaatttcaggggtcagacaagtttaggggatactgttggaatgttaaacagctttctttgttcagaccttctcaaagtctctaatgtgtgaatgtgcattgtgcattttctgggcgtgcatcaaatatgcactatttgccatacttgtttaactgtcaaattttgtttgtgattttttttaagacattaactccccaccatattcttctactgtgggccctcactgagaacaatgaaaacactctgaatacttgtttaaaagttaaattgcatgttatttataagatcctttcataagagagacaggttcttcagatagcattttcagattctcttttgttaagacagtttttaaaactggagtatattactgctagtaaatttgagagaaataaaccacaagcatctaccaggtaaagaaaaaaaaaaaagaacaaggtgaccttgtcaggcttctttaaaaatgaagtgaggagatcacagagaggactctttgttaccacataagacacagctgccatcagcagaggaagagtgaggcagtgtgagcactgtgaggcgaccccaagatgagtgagagaacaacagctattaggaagaattaatgagaaaggacaaagttgtacttcagggtatatttctgtatttttcttcctactaagtggtctcagtgaagatcttggtaacatgcaaaaaaaaaaaaaaaaaagaatatttttgaatatcttatctttttcaattaaaatacttgagaaacacttatcaaaaagacattctttcttaacaagaatatgtaatgtcattcatatgccattttatgtatatcattttagtatatttaggcatcttatttttgttttgtttgtttttgggatggagtgtctgtctgttgcccaggctagagtacagaaggtgtgatcttggctcactgcaacctcttccttgagggttcaagcaattctcagttcaagtgattctcacttcagcctcccgagtagttgggattacaggcgcacaccaccacacctggctaatttttttgtatttttagtagagatggggtctcatcatgttggccaggctgatctcaaatttgtgacctcaagtgatccgcccacctcagcctcccaaagtgctgggactacaggcatgagccactgcatccagcctatttagacattttagtgtccccataattttttcctacctcatcttcttgattttgatacccaaagttaccaacccaaattattgaataacctttaccttccacttctgtatgaaagggaaggctgcaccttcctctcatcattcagaacgtgaaaacaaggctaaatctctaacatcaatcattacttttgtcagttaccagttatatccagtgacactgaactcttaagctattctcttaattcttttattttactagcattataatatttggaaaaaaatgagccaacatttgaaacaagattcatagtatgggtagcatgtttagaaatgatgtattataggtgaatcaaaggatcattttgaactaagaatgcaattaagcatttcttaaagaatctgttggaatcagttaacagagggtgtgggacaattttttttagtatgaacaaagacacagcgatatcacataaaaatacatataaagggataactagaaaattcacttggctgtaggggtatggtcccagttggatggaaaaataagacatgatcacttagattgggggaatcacactgaaacgcaagaaaggatcctgaggctgagaagaggcccagtgggatcagagaacccatgactgagagactgaagggtcatatatgtcccctgttgtcattgtgagattggttggtaaaagataaaggaaaaattaaatccttttcctttaccttttggtattgacttctgcctttttttttttaatctgtttttttttttagatctgttattcccaaacagattatgcaaaaccacaggataagtatggcatgttggcctgaaatatgaattgtccttatatcaaggggtgacaaactatggcctgaagctagcctgccacttgttttagtaaataaagttttattcgaacacaggcacacacattcgtttatatattgtctactacaatgtcagaattgagtagttgtcactggcaaaaactgttttgtggtccacaagcctaaaatattatctggccctttacagaaagggtttgctaacccctacctgaaataattgaggaggaagagtcaactaatttaaaagtgatttaaaacattatagtataatatagaggataaggataactagaaatttgtgtggggttgaactccatctctatgttaatgattatatatataattatattgatacaagattaatataattaactttgtatccttggaatagtttattaacttctgtaagctgaagcttcctgatttgtaaaatcgtaacagaaataatatctattattgttagaagtgttaaagagaaatctgtctacttacttgttaacaaacatggtaaagcagactttatcaaaggcagacatggtggtgggcatagtgaccgctacaacggggtcttgcagtgagggagagactccagctcctacagggacaattgaggatttataaccaaggagcagggtggggtcagtgcatggaaaattgcagttgacccttgaacaagggtttggactgtgtgggttcacctatacgtggatttttttcaataaaagttacgtcaagtgtgccttgcctctcctgccccctcttacacctccttcacctcttctccctctgccacccctgagacagcaagaccaacccctcttcttcatcctcctcctctgcctattcaacatgaagttgaggaggatgaaggcctttatgatgacccatttccacttgatgaagagtaaatagattttctcttccttatgattttaatattttcttttctctagcttaattgtaagaatatagtatataacacatataacatacaagatatgtgtcaaatgactggtttgtgtcaacttattggttaaggcttctagtcttctagtactctataagtagtagtcaaatttggggaaagtcaaaagttacatgttgacttttaactctgagggagttggcaccccttacccctgcattcttcaagagtcaactgtactacaaagaaacatcaaggatacggggtttctggctaagctgactagacaggattcttgctgaaggcaggccaggggattaagatattggaggtatggtcagatgcccagggagatttccttctaactgacttaggattcttgttcaaactggattcaagaaggacagagagggaagcccaagttcaggcctagtcaagcagggaactcagaggagcctgatgaaggttttggtcaaaggagagagtctgtgtcagaagtcaaaatggtaacttaggtaaaattcttagccagcaccagccaagtagttagcattcagtaaatgttggcgattattatattaaaataaaattggaaatatattgcattacaattaaatttcattaattgtagggaattttatagatgaaactggagacatctaggcttttgtaggtgctaaggccaggagttcagcctgctcaatagggagcgcttgggtggaaaagttgaagcagcactgccttaggccatgtgaaggtttcctttctgcaggctgttcttgcctgtggtggtagctgagtctccactgattatggagatcagaaactttgatgcaattcagtagttaaggtcctgctgtgctgctgactgtgcttttacttgggaaccgccagcaatttaggaacatacctgactggaattttacttaattttttttttaagtatctaactccctatgaagaagtgcttaaattgtgtttgataggctgtgctcttgctaagcagatgaattagggtccctgactccttagcggtccaggcatgtgtttggttaagtcagcaatgaaaatcttccctctatcaatatttgcctttggtttggcagacttgatatcatatctcactgatttctaatcctttttgaatgcattctttgtaataactgctcgctctttgcaagattctcttaggctcgtgttaactagctttcctcgtgaagtttgtacagtcatccttgggtggagtatccacagggaattggctctaggccaccctgggataccaaaatccatagatgctcaagtccctgatataaaatggtgaggcatttacatttaacaaaagcacctcctctcatatactttaaatcacctctagattacttgtaacatctaatactatgtaaatgttatataaatagttatactgtattggttagggaataatgaccaaaaaaaagtctatacacattaaatgcagatgcagccatccattttgcctccaaatattttccatcagcagttgattgaatccaagggtgagaaaaccacagacagactgtactatgtcacttggaggcgtcatccactttggtagatgtaggcatttactttcttctcatactttggtgaagggctaccaaaaaaaaaaaagcaatgatgtatagagaaagaaagtgtagctaaagacttctctatatcaaattattaaaataactttactattgaaaagttttaagttccttaaagaacctgttcttaaagcttcctgttgtctagtgcctggtatatagtagatgcacaatgcaatgcatgttgttcaactaaaaaactctgaggctttagaataaaaaaaactttaaaaatataatatgacatggtaaaccaaaacaaactgtgctgtaattatatcaaatatattagtttggttatggttatatttcagtatttcagaatcatgtcatcaaattgttgtttctgtgtagagagaataggatatcttttcagaaaaagcatagaaaaacctttcttatgagtcataaaagatctatctatatttctgtattaaaccattacaggcctgacataggccagataatgaaagaaataaaatagaagcaaagattgatggtatctacagcactatggcaactgtggtctaactctaatcccgtatagagcaggaggtaaattctggaacgttaacatgtgccttgtcacgcagcctacagcaccccctccaccccacaccttctagcttccacctttaccgagccactgaaaccacacacatccttggcatggcttaatacaactgacttccctctctctcaaattctatcttcccttaacttccatagcattgtcacctgccttggtttgcaactatctcatttactggatttcctaatctcttagaggaccttaatgttaattcttatcactctactgcccaggatacagatttctcctttcatctatactttttcctgactttggctgaaaatccacacattattattgatactgattattctctgtaagcaggtaagacaaatcaggtctccagccagggccctgcctaaactccagctccatgacttttaacagtctgctagacatttccatttggatatcttttgtctcaaattcaatgtgtcagacaatctctctagcccatactttctaccagcatcctttctaacctgccttttcctgtaactggcataataatatggcaccacaagtcatgttgcctctccttcacctgtccatatccagttactaagttcagttaacttttctttaatggtatacctgaaatctaccttttctctctgctgacagcctaaattaggctcttggcctttcctcaagacctttgagattctggttttgatcatcatacataatcttctcctcctatgagctgtttcattcaataaccccattcgctgtcattccctatactcctttcccaggttacacaggaagcattcagaaatatctgttggatgatttgttacaaacacagtaaggatttcaggagatgcctggttccagttacatttatctttatattatattgaaatgtctcaccgagtaaatacagttactctatactaataggtgaagcactcctggcaaacaaaaatgctgaagacagtccacattaaaataatgagtgttggctctgtgtttgttaatgttttcattaatgcttctattgaaattaattttgcctgccctttgtattacttataccccttgtaagttacacagccctctcaggctctttatttgtattcatatttgttgctcaaaataattatcttattgctggtgtttataatatgccatatttaatatgatctctaaatttaattactaggctatttatttcgtctttcttactagagaaggcagtgtggttgcgtagttaatagagtagattctgaaactgagctgcctgaattcaagtccttcctcagcttcttcttagttttgtggctttgagcaaggcacttaaactcctgtacttctttattcatctataaaatggacataataacacttctagcattgtgttataaatatatgtaaaataaatatcaaaaaatgttagctatcctaattattatttaaccatcggtttaaataagattaaatcagctcaccctattctgttccctcctgctgcaggatacactacttcatactggctagatctgttgaaattgctttcttaggattttttttggtttgtttttttttttgctgttttttttttcccccaggactatttgaactagtagtagaatgaatacaacattcaagattatacttactgatctgtcctcattcatctgtgcttaataattgtcactttgtctatcctgatttttttccagcacattaatctgttgtcctactgatattctgttcttcaatatttaaaaaaatgtattataaaataaatattgcttttaacattactgccatattaggctccttctgagtcaactgattaaaatttatttaacatacttttttagaacagttttaggttcacagcaaaattcagcagaaggtacagagattttccatatacctctgctcccacgcatgcatagcctcacccatgatcagcatcccctgcgcgagtgggatatttgttacaactgatgaacttatactgacacattgtcaccaggagtacattagggttcactctccgtgttgtgcattctatgggtgtgggcaaatatataatgacgtgtattcacccattattgtatcatccagtatagtttcactgccctagaaatccttatttatataacttttatgaatatttggttttttagggtaaattctggatgagcactgctaagtgaaaagatttgtgcattttattatcagaatgctctgatgctgtttcacaaatagtttataagcaactgtgaataatggaaagacttttgaactgtgggtattctcataaaaaatggaactcccagctgggcgcagtggctcgcaccagtaatcccagcactttgggaggccaaggcaggcggatcacctgaggtcaggagttcgagaccagcctggccaatgtggtgaaaccccatctctactaaaaatacaaaaattagctgagcatggtgataggtgcctgtaatcccagctactcaggaggctgaggcaagagaatcacttgaacctgggaggcggaagttgcagtttgcagtgagccgagatcgcaccactgcactccagcctgagcgacaagagcgaaattctgtctcccaaaaaaaaaaaaaaaaaggaacacccccactattggcctgttttgcctcctgtatttgtcatcttagacaacagattgtttctccatttattcatgatttattattcattttgtttataaaacaaacttatgatggctcttatgtgcgccagacactgtattataggcaagagatcaaaaagtaaatatgaactgttcctaccctcagggaacataatttggtatagaaggcagatatacatccataattgaagtgccgtgcacaacctttcaaggagggcagcctggagtgataggggagaaagcaagaagagcactaccccagatttgtttagggtctggggaggattggttaggaagggcttcctgaaggagaggatatctgaactgagcaattaacaattaggagttaggcaaaggaggggaagggcaagggacattattccaggcagaaggtataacatatgcaaagcccagagaaccaagaaaacacagggaaagcatgcttatcagaaatatcagaaatgtgtcccctgatgtgtgtgaacggtccatattacagcaattttcaaatcagcataatatggggaatttcacaaatcttaagtgagaaacaattatttcaatagataagcagagacatttcttatctgtgatttattacatgctaaatgagtaatatagatgttgtaaacaaagttacatagtattagcaaaatattaaataactgaatgctgacattttctgttagctaaaattatattttgggggaaaggggacttagcaaggtatgaaaatgtcttcagtgtgtgatttaaagcatttaatgaaaatgagccaatgtaatcttctatgacagatttaattctgtcaagcactctaagacactagatagcaaaagaaagctgatattcaagtctaaacagaaatgtcagcaaacacacctatattaatggaagtttggaaagcaatgtgttcttctctctaaaaataacaaagattttacttctagttaggaggagcagtggaccttagggatcttgtggacagtaagattgatgtttgtttgaggcagaattttgagcttcgggcacagttttcactgagcagaagtctataacgcttatacatcaagggcacttatgtggtgattgcaaaaattgcagtgagaattgactacagtacttagacagtgacattttaggtattttcttcctgctcttttcagcagctggttttatggcaggtgttttctgtgacattctggagcaacaaccagaaatatggcatcaggggtgatcataagatgaatggttggagaagacaatggcttcctgacactgcattgaagaattgcctaacaagctactagttttaaaagtgaaatgctatttagagaaaaacttctaggtagagaaacagatatccagaacaatgcctgaaattagaccatcatttattctgaaagtttaaaattttttaaagaatagttttaactgaccgtgtggaggagtatttctctgttatttatcccaccactcacaagtacttcttggtttttttttgttttgttttgttttttgtgttttgttttgtttttagacaaagtctcactctgtcacccaggctggaatgcagtcgtgcaatctcggctcactgcaacctctgtttcctgggttcaagggattctcctgcctcagctgcctatgtagctgggattacaggtgtgtgccgccatgcccagctaatttttctttgtatttttagtggagacggggtttcaccatgttggccaggctggtctcaaactcctgacctcaagtgatcaagtgatccgcctacctcatcctaccaaagtgctgggattacaggcgcgagccaccgcgcccggccatgggtacttcttatatctgtgttacactttgaatggcagtattcaagaattttgcaccaagaaaaaataaattatatccttcgtaatatctataatgggatgagacagagagttctactgtttacaaactgagcagttgttataggcatttcaacatccttgcaaaagcatttgataggctaaaatttattttgagtaaaaattcacattattttgtatatttcttaatgccattctttcccatctagccattctctttttctcttcaacactaaaaagataaatataaatgcctaatatatatacatattgtgtgtggggggggtgtattccacctatatatagtccacaaaattaggaaatactagatagaagagtcctagtacattgaattcattctggattcactgcctcgtattcttcatatccactctgagtatataaagaatttagcacaaggcctggcatcttgatagttatttgccaaatatgactcatgagtattctaaaacatatgtaatgaggacatgactctgtcattcctgataggttgtaaagagtgctgatgctgatttcaagggttgtgtcaagatttggtaggtcctgtctcaaatggaacttcagatagacctcaagtctagtagaggaagaggcacatacctggtaccattaaagctctggatccaggacctcagccccagaagtcggtcacttcatcaaaaatgttgctcaagtgtaggatcatataaaatgatgtatgtcctaaaccatttccttttaagttttatgaagatagtcttatttcccatctcttttatggtgggaccaaagactcttgtctccattgttggtccattgttgtagttctggaacatttttcttgctaagacataccattttctgtttaagtgcactgacaaattaaagatacttataaagcattctcagagtataattctagatttttgtgttttttcccatcttttacagttatctcacacctaatttcatgtgtgtacatatgttttttaaaagccctatttccactcttattgtatgaattatatatcctatgtaacctgactgcattgccaagcacaactagcattagcacatcttgccttgtcttgtcctttcccttttcctttccttttccttttccttttcctttctttgcttttcttgctttttttttttttttttttgagatgggagtctcactttgttgcccaagctggagtgcagtggctgttcacaggcatgatcatagtgcactacagccctgaactcctggactcaagtgatcctcccaagtagctggtactacaggtacacactaccgttattcagctttggttaactctaggtcatagagcttaactagttagagcaatagtgagtggaattatcagagagtagcctcccgaccacgggcattgctcatgtgctaggcaccagttaggatatgtgacagagggaataggagtcttggttaaccccacgagtcagtaaagtgaaagtcaattaagagagattgtgttatcataccttcagcatatgatatctagaagtattgacatggcactatgaaatgcaaaagggaacgactacctgggtgggcaaggtatttacaatctggcaggaaagacaaagatgaaacaaataagtacaataaagcttttcagtgctccagtagaatgtgacagtctgcagaggaggacaggctgaatcctgtggaggggagaagaacaggaaaaggttcatcagaagggtgatgtttggactgggtgtggtggctcacacctgtaatcccagcactttgggaggctgaggcgggtggatcacggggtcaggagttcgagaccaccctggctaacatggtgaaaccccgtatctactaaaaatacaaaaattagccgggtgtggtggcgggcgtctaatcccagctactcaggaggcagaggcaggagaatcgcttgaacctgggaggcagaggttgtagtgagctgagatcacgccactgcactccagcctaggcgacagagcaagactccgtctcgggggtagtggggcaaagggatatttgagttgatccctgagtaggtgttctgtgggcagacatgggagaagaaaacttttctgggagaggatgaagcatcagcagaagcacagagaatcatttagctgatggtacattccagggactgtaaggtttttgtttttgttatgcctgaagcaaaggttgcaaaggagtgtgaaagtgtgatagaggaggaggtggacaagcctaatggttaggaggaatgagattctggaaagcctcccctggacagattgctttatagtttggagtgtcatgagtcagcagtgacaaacaccaatgcctgcagagatgaagaaggtggcataaattaataaaagatcagccctctttttttatgtttttccatttttgatagtaccatcccagaaatatttttctttttaattctaccgtctgtaaaacaacaggtaaagccttgaacaaaatgccaagtgatattttgcttcagtattggaattgagaggagtggagactgtggcacaccggagggcacatgctgtatggagaggaatcagatgtgcctcagatcccatcacttggtgccaggtgaaagggtggacctagtgttgcctggtcttcagatttttcaagataagctgaacatctggatttttattttaaaatctcccaatttttaattgttagtgactgacttcagaagttgagtgcataaattaatactctgctgaatgcctggcgttactttcagagaaaccacttgaagagtttgaagcaggaaagcaacaaaatcagaccttcaattttggaaggtcggtgtgctgtccacaccgttgaggttgaattgaagaaggtttgctcctggaggctttggaaatgatcccagcacagtcgatcagggcttcattgacatcactggtggctgggtgaagaaaaagagtaagaatcatgacaaatagcaagcagattttgatcaaccttaaaatacagcatgttaaatatatacattaagtaaaaatagaaattgatactataatgcagaagcaaaagctgtattttctgagaatagtgagaaaaaggatgtgctacagactgataggaaagactgacatgagacaacggaaagatttagtttaggtatgggcaggaatttttaaaagaaaagaattatagaattgttagaaagatttaataattagggcatttcatctgcaaagtaatagtcataaaaaggctttaaattaatttattatttcacacaacaaagcatccagaggtaggtagtatggtgagcaactcagtggtgttctcagaaacccgagtctatcaggagactctgttttgcttattcggcatctcagcctctttggcaggaccacctcagggtacaacatggctgccaccaagccagcaacctatgcagaggataccatcctgaggcagaaaggggaactttaaaacaaatacacccgttaagaaaacccctttctcttgtcttgttgaccaaaatcatatcacttacccatttaaaaacctgttgctggaatgaaaatggaactatcatgattgactgagattcattcctgagagaaaagagggcctcacccttccctgagcacaaggggtgggcccaaggaaggcaaccaacatttgccttctcaagaaaacttgctgacatctgccatggagtactctgagacaagtcaacaggaaaataacagttgatggcagaggctttggaatagatctgggtttgggtagctgccctttcacttactgtccttgagacccagaacaagtgacttgttctctttaaagcagcttctttgcctgtaaaataggaataattttagatcctcttgaagattaatcaagccaatgtatgtaagatatttagattcatgactgttacattttaactactcaataaatcgtggtggtgggttgattcataatcatctttaaagggcagtccagttaatttgaaagagaattgttggcttggtctaagaacaaaacgcttgccaataggaaacatgttaaaagtaactagacattaatagtaaagttactttaaaagtttcagctgtcccctttattcttactgaaactgtgagctgggatggaagagtgcaggataagccttggaagattcggctctgatccattctggcatcctgaatagaggccaaggcccgcttccccatggcttcattgcactgagaggaaaggctggccttgcaaaccttagtgtcccacatccctcccagctcagctgatctgtgttcctgctttagagtgagctgttaagcagcttgtagacaaagtaggtgcttagaaataatttgcattcattgctttgaatgtttacttaagtaattctgctcctgctttaaagtatcatcttaatctagaatattcattaatgcagagaaaggtattaaaaacgtagtttacttttgaaggaatgacaggagcaagaaaacatttatataatgaaaacattatataagaagggatataagaaaacatctacataagtaaaatgcttctatctcatatatactgagagtggccctttatagtagtaagaaaaccagctgcctaaagcctcctgagtctctgggtgaaagtcccagcaatatggcattgttactgtgttgctgtaatttatgtaaatgcgttgtcagagatgaattaaaacttatagttgtaaatctacaaggacacagcagtaactcacacagatttattacttgtagacacgtatataagcctctggaattactgcctctactgtagacagaggttaaagaagaaggcaacaacttacatgccattatacctatacagcagtttgtcattcattggtagtggtatgaatgcaaaatacaggcatgtggactgtccttcacccaatacagcctaatccacaaatttcaacaagaatgctagcatcaaagaaagagcatcaaatgaggagtcagaaaatttgcttgtatacccatttactaagtttgttgtttaacttctctgagcccaagtttattagggataagacaattttttaaaaaacctgtcaatgtcccccaatgtactctgcatggcttttagtggtaaccatgcatgcattcattgatttaagaaacatttattgagtgctactatatatcagacacaagactgtatttttaggctaaaggaaatagtttcgtccaacatccttatttttgcaaaaagagtgtgagaagagaaaggtgagatgccttctagaagtaggtatgtgaaagggcttttgaaaattgcaaagcccagtcaagggaaaataatcattaattgtaatacaaacccagtatttcctttatctgatgatgtatgtgtgtttagttctccatggatgtttccatctgtctaggagttccttttatgtaaattcactgggcattgccatttagcattgttctttccaaaccaggtgacatatcagaatcatgtaggaaatttcaaaatagactcctccttcctcagacgtcctgaggtctttaattcagaatctttaatgcagggacacaggtatctacgtttctatagcatgcccgcatgtaattctaaggcaggctggatttggaaactctgagtttacggaataaaataacatactgtatgaggaacaaataatgtgtgaattaatatttcagtccccaaggcctataaaatcaaataatttaaaaataaggaaaaatcatttgcttgagatctagaatcacataggctgaaatggaactttaagatgagtggaatttgatttttttattattattgaaaaggcaatgtagcaacagccttgaagaaaggtttacagggggaaaacctatgatattgccgcaaacaatgatttttgcctatatatgggttattaatatgtataagtatagatatttgcagtctatatactcctatatttgctttgaaatattacctaaaatcataacattttagttaatagggttttagttattcctttctacccataaatttctctcactgtcctgagcttagttagggctaggatccctagatttctgtgttatatttgagaattttcctgtgacattatgctaaaccacccagccagaattttaagtccctactgttgaagacacatacagcctccttttctctcaaccagtgccctttttgatgtcttttcagttcttcaaattacaacaggagggagcctctatctgataaaatcgctaatagaaaatgtgcttaaggaagtcaccaatatcttgttaaccctttgtagctttgctccgaacagggacattttctccaattactcagatcaacacagaattcaggatgcccctatctctggatctctgtcacaatttggtagactgtcttcttttgctgcagtatccatcaaataatttctaaatttaacaaatagtatttaccacctactagctactaggctagtgctacacactattgaagtaatatatttctatttaattattatgaggcattattactaatgcctcctctatggagataattagaagaacacttttagctgccttacttttccaagtggtaaatccagtgaaattaccaagatattagccatttctatacgttgggaaaatactaagcatttagtttgttactatatccttcatgatatactaaaagtaattatgcaccacggttttatggtaaagcaaccagagacttccttaaccagcagccatagccttttttctgccaaagccacaggccattctgagctctcctctaagtgtcctctacccacaatggcaattacacatgctccagagcaaaagtagggactcaggttaggctctaccagagagctcttttctggctttaggtcatgatgagacatagaggaggttcaggttggttcctgggtgctcccattttagagacttagattgtttgggaattctgagctatcctctttccctcagccatatttttaatacaaaggggcttcttagaacagcccctgcagagggactgttgatccccatccacaagctgtggctagcacccccagattgcatttgcataccagacgctctggcagtggtgtggagccgtgtgtagaagcccaagacatatggagtgtgattttacaaggctgagctcgttcatccactcattcatttaacacatgttagtgagtaggtgtgtgtgctgggttctatgtcaggcagtgatgtagaatggttagcaagacaggtagtgctgactaccttcatggagcttgcaggctaaaggagttaataagcaaataattaaagaaacacattattacattttgcgataaatactatgaagaaaagtataaagtgtggtgaaaaagtatgcaacagggagaactaaaaggatgatgtccaacctttgtaagaaagtgacatctaactcaaagctatgtgtaatgagtaagggttatggagacatcaagtggatgggagagaagagcatgtgcaaaggccctgaggtgaggaagatcttagggtccttgaggaactgaatggagtgaatgggaggaaagggaacctgacacaagacagacagatgggccacagccagctcaccagaggccctcgccagtcaggatgaggaattttgatattatcctcagtgcagtgagaaatcatgaagggttctgagcaagttacattatctgatctacccttttataaagatcatttttgctgctgtgtggggaatggattcagcaagacaaaagtagaaatggggagactagtttcaggctattccagaagtactccaggttagagatgagagtagccttgaccgttatgaagacagtgaaaattgggagaaatgaaccaatttaagataaagcctaaaggtaaaattgactgaacttgtgatgactttggtatggtaattaagagagaatgaagttttgaggataattcacagtttttggcatgaggagctgaatagatgggaaacattggaagaggagcaatttgtggaataaagagtagaagaaaattaatagttcagtttttgatgttagctctgagatacctaacaagtattcagctatatacatgtggagatgccaagtatttagctatatgcatggctctggagcacagacatgtctgtgctcgacataaaaatttagatatcattggcttgttgatgtatttagagctatggcaacagataaatgtagagtgagaagaaaatagggctgggacaaagccctgaaaaacttcagtgtttagagataagatggagagatgcatctggcaacaatgggagagtggatggtttgaaggcatgagaaaagtcagaatgtggtggtgccatagatactcaaagaggagtgtctcatggaagaaatgctgccaaaaggtcaagtaagataaaaattatgagaagtccatcagatttggcaacagaaggtcactggtgactttacaaaagcaagctctgtgcagtagtgaggtaaaggcctggcagcagtggactaagtaggaaggcaggccagttgagacctgcttagcttgaaaagtaagagaagagatagaagagagttttgctttttaagatgtctgttgttacatgtgctgtaggatatttcactactacaggagaacaactgacccatggtttaccaaggtaaaaccctcagtgatagggaagggtttaacaagagatgtgaaagatatgattttggatatgccatgaaaaaaatactccgcacattgtatactgatcagtgttaacactattattctgaaccgttttaatatcaatttaatgttaacccccaaaatccaaggggcattaaggtctgtgctgatgaaagtaatgaagggaccattgagacaaacctgaaatcctaggtttgtgccaaaagcccgtatctgactttaaatagggccacttgtccaggggtttcaaggacacacattactttaaaatttggtggatttcaaaggcacccagcttctgaatattcttaaaagaaattatgcttacaggattaatgagcatatctgttttgccaaggagggagcattattcgtttcacaacaaaggcttccttttcatattagcaaaggtatcagaattgactcccacaattgttagaggctttttcttcatttttggtgaggggtgtagattcagttttggaattttcatcaaggaaaattttcgtcaaggaaatacaagaaggctcatgagcttgagctattttcacatggtttaggcatctcactgaaagaagagcttcttttctaatttttcacctttttccatgaagcagatagagagctgtttactacagcctttgtctgggtttggcattgattttaaatcacctggattgatcatgtggttatgggacttaaaaaaatcccaccaaataccaaagcctctaaacacaattagaattgaggggtttttaatctgctagcattatgtccataggagtacattctaaattattcttaacttctgctcatgttaggtgaaaataaagcaccatgataatgtgtagtgtctgaggttcagcagatgctctctaaacatgtagaaatgttcctagttttcaaaatgaggaagcatctaaaatctatgtctgtcttggagtatttcactgccttggcagtttcctcagccaataagagaaaaataggcaaatcaaccagctgtcatgtcacacactcctcagctgcaggacaacagcaggatttaggcaagctgatctcaaccagatttgacaaagaggtggaaggtctaaaattaaataggtcaacacaaattatctaataataggtaggtgtgaagggacaacaaggggtcccagaggagaattgctttttaaagactgtgtatactcttgcttttcatttcggacttgtcattgttagcagcatctgagtctgaaccgtcttatttgataatgaaaaggttcctattttttactaaatacctttagattgttagtaaaagtggcgttttcatgaagtaaatatttacaaagcttcaaactactttaagaagccacctttcctattttcaaggcagtaatttttctgtggcttgctatagtactcagttttgttgtcatggtgactagataatataacttttcaaaaatggaaacctgcttctaactatattgcaccagcctaccagtcataaatgtagagtccagagtggacaatttatactcagtttctctcctagttaaagtctaggtttactttatagacatcatatttcaataaacacacacacacacagagagagagagagagagagagagagaaataaactccctgtcagtttcctaacagtaaaacataaccatcaacaaagaaattattttttgattcatattcttactagtcaaaaaatgtgtccccagaataagtataattttggagcattcttatggtagcatcttactaaacaatatagaactgttatcctcaatagctgtaaataattgtcagtgaaaaagggaaacaagatagtctcttatcactagaataaacagataatattcctttaaaatacaattaaaatgctataagggatcagtgatttgtttcctaaattcacttacatgccattttacacaattgcagttttttcttttttcatttcttttaaatattgtaacaatagaaacatattacacttcttcctatgacatatttgaggaatgtttacagttatcacagtcttgagctaggacacgtcctaatgcttaaagatactattttatccgtttgaaaaaaagaagaaattttaattgtgaaaaataagaaataaaccttaaaaattttcactgtcctattttcttccagcaccttttcttcatgtttcatgaaagatggctttacatagtaacttagaaataacacccaatgattaacagaatgatggatgtgatgaatcacctttctcttgagaaataataaatcaacatattcctacccataaatttttactgaaatgtatgaaatattagcatcatatatttagcaaagtgtcagttacaaaaactgttggcaaaatgtcctcagaaccaatagaatacatttaaatgttatgttccttttttggaaacaaagttattcaaatataattcacactttctaaaatgtagcatagttttagttcttatttacccttctaatgataaacatgagcatgatctgtttgagcactagcaatactagacaccaaagttaacaaagtaaaatctcccaaactggaatgttttactcacaaaaaaacttggttaaactttgattttaatattataaactagaatacttcataagaccatgtttgcccttttttatatttaagtcattatgtcttaatccctatttatgcagcactttttaaatgaaaccttcccctgggttcatttttgggcagactttatattgaattgtgtttggattttttggaagcctctttgaaggatgaatttgtgattgttagttgcacaaccagtttcctttattttcattttgggggcggttttcctacagcagccatagcgtactgtgggaagtggagcagggcagtgcccttccctggctgtattgatttgcccttcagctgtgtgcagtgccgagagaacctcgggccttgttgttgattatctacacaatgtctctgggagcattattgacccattgctgccgactgcctgtggctcttgatttttcacaccatctccatgacactcataataaaacatactatcttattgctactcagctctgggagccaactgattcagccttagaacaccacagtgtttctggagaacatttattgtatgtggggtaaagtgttgcagcaattttaggattctgtcctgtgtacttttaatagctacttctatagcaagattccacacactgctaaatttttattgtcttaaaaaagccagtgctagctttgcatatattgtcaacatgaaatttagcatgattaatataaatattatacttttaaaataataggctaaggaaaagaatattttgcattaacattaggcttgacatgttgctataacatgtattttcaaaaccaaattttaaaatatatcacaaggattatgctatgatttgttactgtggtatatatttgttatagtgaatggggaggaggtgggggaagttgaagtttctgattgtatttgattagtatgtttctaatttgccattctcaaaatgtcttccaagatacattttaacttctctatatcaagtacacaaaatcaagtaaaatctttcctcttagttaccttgaaatatttttttaattgaagctttaatcagtggaaaatgggtctccttgagcatgtatttttgttttatattgttttatattggaggttttatatattttattaatttttaattatttctgatatatttcctaatccacaattagcattaacaggtattgtacactaagtattgatggaaattatagcatgtcaaaaggagctcagagatcctaagaaacaggctttttctgttggtagagtgaataaaatgtacatgtttcttaaagagagtttaaatattttcatgtatattaactgctgttactataggaaaggcaatatagctcaaaaaggggcaattactctaaatttgtgttggacatttttataggaaagataggtcacaaattaggttaatataattggttgctttttactgaagttgtttagagtgttttcattagaacaaaattttctttaacaaacctactttaaataaattcagactttggaaattataatagagctaatttcagcttctttgtgtgtgtgtgtgtgtgtgtgtgtgtgtgtgtgtgtgtgtgtgtgtgtgtatacatattcaacttcatgatttccctgaactagggtctgtttccaaaacatctactgtaatactgatagcgatatgttcaatgattagtagctcaccactttaagatgtttaaaattttgaccatttatatcagtgaattttgcaatttaagaaaaggatcttgcttttaaactgtggtattatcaaactaccaacactttgacattttgaaatgataattcctttgttctggtttatggatttagttttcatgttttatcatactttgataggttttatgtttgaaggatacatagttttctaaatgtatgcttttaaaaatgtcaaaccactataaaataaggatttttaaattaaagctttcagaagtgtggcttcagagggtggggtggtatatagtatagccttagtgggctgcctctggatgacagatctgtacagaaccccagacaacaaagttgtccctaattttaatctagctgcttctcagctgatttactttcagtttatgtccacttgatgtaaacagaacccaatgacgggggaaaataaaaaaaaaataaaaataaaaggcattccacttctcatccctccaaattagtgttgttctattgaattaaaaaattgaatctcctcatcatttttcatgccaaattcatgacattttaggacacaggatgagagtagatgccattaaaccctgtaagtctcaagcagaggccttttttaaaatcaaggtccataggcttaggcaacagttcagtaacctttgggaaaaccacagggtgtgttttacctattgttatgcaaacattgttcttccagagctgacctttactcacagggatttaacagccatagtaagtcagggtttgaattccctgtgtctgagttgcggatcaagtttacaataaccatgttcacaattgttttgagcgcttccacctgatggtttttgatagcatgaggtttgtgttccacttaagcctaagtatttcagtgtgtctttggacattcagaaccacttgaaagtgtacacaaggattcctctaactgagacataatcatcaggtattgcaaaggttaagccttatcatctgtaccaaaaaaaaaaaaaaaaaaaaaaaaaaggtgaggtttcatcaaaaacttccatcctcacaacctttcgaccacaatttgatgatgattattgattatctcacagcctttcactcacgctctgccaccgcggccagccctgatatacagatagggctgcagtccagctaaaataagactccatcttgataatggactgagatgaggatactgttatttgataaagataattgatgtttcacagtgaattggaaagcagcttcaagtgcaccatatctgaagctatattttgtccacaaatatggcagttgtttataaaaatagaacaaaagaactaaagttacgtatttgggcataaccttttaaagcattttggtgctatgattttttttcttttgtgcttgattattttaaggtgtaatagagaaaaaaatagtaaagagtatatcacgttattttttgtctctggtttcaggttactttgttaaaatcgtacatggtgtaggtgttattgatcagttcccttgcagacttaatacttaaatcctatgcttggattatgatgaatcactgtcatgcataagctggatatcttaggtcaaagttaaatttcatgttatcattaatttcttgaacattttacatactgtgtgaaaacacaatttaaattattaatcataaatatcatgtctcctggaaaatgtaattcaaataatctgggaatgcagactgggtttctcctcatttattattaacaaatttctctaaaaataacatgtaactcattgtgtctgttcatcacgcctccttcagccaccagatttaagttgattaaggtatcattcatcttaggtactgttcatccgatttcttttagtcttatcaccttcgtaacccctaattaagcaataaggcttgacagggagtatggttatcatgagataatgacaccccaagtgtgttgtgaggcataaggttcagctgagtgcttctaaacctctaggggtgtgattatctcatgataaacataccacattgctgctcattgatatcattgctgcctgtgtgcagcactccagttgaggcaaaattgacatttccttgcccaccttctcagccaatccaaattggtgcttctataaaattgttagttcaggtctcagatttataagccaaagtttaaacccataagcttttattttattgtttaagtggtatcagttgaacatgcaagtacatctttgaaaaaaatataaatttattttttaaaggtaagtttcctcagaagaaagacctcatggaaggcaagtgtgtgtgtgtgtgtgtgtgtgtgtgtgtgtgtgtgtgtgtgtgtatagagtcgtcgcaattttgcagcagttaatagaccctactccaataaaaaaaattgggcattcttataaattcagaagaagcatggttgtgctttaattcaaaaaaagttattaaatagttggaagttctatagggaatattaattggatgtttggtttaggaaattctttttaacttatttgcaattatcacagttaataatagaccaagggagagggggatggagaaaaatgttagttttgtagccttgtttttgttccggtttcttgtaaattgattatatttcagggaagaataatttatgtttttttatattggctctgatttggtatttaacagaaaaaaattgaattatctacagtaattttggtttgactcttaaaggagaaaaagatgccaccttttagatataactctcaggagtatatgtgtgtatggttttttgaaaaaaaaaaaaaatggtgagaataccatggctaattttataatgttttcagcatgaatttaactgtgtcttctaaagcaacattattcattaggactttctgtgatgataaaaatattctgtgtctgtactctccagtgtgatagccattagccatatgtggctaataagactgaggagttgagttctttgttttacttagatgtcatattctaaagaaaatccttgaaagttaatttttctcaagctcctcacaaaatttccaataaatgaattatcttatggctttaaaaaatgatattttttccaagtaattagtttctttgatggtcttttttatcttttgatgttcaaataagaactggaagagtctgttcattttatagagatttaaaattcttcttagtacaacttctactctaatttgtatgcaattttcagaaggtcttgtcaagtagttaggcatttaatgcatgctgaaactattaatctacttatgaaattaaaataataacttccctggcgaagtgaaagacttttttaggaagaatttctatcaaccaaaaatgccaggacttttggtgcttattttttaaataacttatgatacttgattatacctgtaattttatttgtctcaatagagtatttttttcttaataagaattataagtttccaagcttacctttattcccgtaggtacagttcctacattgaaaatgtccagaatattatttaaaccttgactgctctctcgatggcacccagccttcatcacttacatggctgagtttgttcattcttaaaacagtctttggattttaaactaaaatatttatcaaacccaagtctatagtaagtgtccactaaatgagcaaacaggaccatgtaaaactaatgtctttctttaagtggaaagttaacacttcttaaagcataagctgactccttactattcctattttttaattaattttggtttttaaaaagattaggccatcctaagcagaaaactataaacaaaattgctggtatataaaagcatagaatttggaattaaatccaggaaaccaaagggcacagagctgaagacccaagaattctcctttcattgcgtgaactgcattgccattcatggcaggtaaaactgtctgaaacaaagacctgaagtccttaggtgagtggcagtagaagctgctgccagtgttgcctagcaggaaaggaacttggagcaatcagggaatcagaggtgctgtggaccaaaagcccatatgggaatccttgtgcttctccagagcctagtgagagccacctcactccacctttacgtttcattttaaacttctttttcacaatagtaggaagttacattaaaaacaaacatcctatagatgagaacatatgatttctaaggttttctttcaaacaatatgagagggggaaaaagaagatgaacctggatgaagcaaaattatgctaaagctgggcaaagggtacacagaggttcattataggtactattctgtctgctgttgtacacttggaaaagtttccatcatgattttaaaatgcaaatattataaaggctgagttgatgtaaatgtttatattactaataatacttaggaggtaagctttacttatatataccatagttattctgtcttaccctcctacctattgctccagctttttctcaccaggctctcccctgcagcctctgtgctcaggctacaccagctgactttttgttgttgttatttcaatctcagcttttctctctcaccccaggacctttgcatatgccatttccccattccgggttctcttctttcctcacttattcctaaacccaacaactacttactacctcactagtacaccaaattgtattgttaggtactagactgattctcattccattcagttcccattcaggttgggttgctcactgcctgttctcctgtgatgaaagtcagggcatgtgcctttctcagctttggacacaacttatgaagatagcaccacctcttactagctaccgtacaccttctcctcatttttttttttttttttttttgagacggagtctcgctctgtcgcccaggctggagtgaagtggcacgatcgcggctcaccgcaagctccgcctcctgggttcatgccattctcctgcctcagcctcccgagtagctgggactacaggcgtccgtcaccactcccggctgattttttgtatttttggtagagacgggtttcaccgtgttagccaggatggtctcgatcttctgacctcgtgatccgcctgccttggcctcccaaagtgctaggattacaggcatgagccaccatgcccggcctcattttttaaatattggagaaactggccaaatgagagttggagtaatcctgaaggaggcaagggaccatgagactagagattgcctaaccctgttggggggaaaaaagaactctaaaaattttagacattatgtggaccaaacaaaacaggtttatggacaacactgagcctgtgggcagtccatagctatggatttggaagtgtgagtgattatagagtaagaaagaaaaaggaatctgtctttgttgaactctccataactgatacctttatttgaaatgtggcttattggcaacagcccaagatattatttaaattgtgaatactaataccctgctttaaaatgtgatcccagcgatctctaagaacaaactgttaatggagagagatgatctgtatctgtcagttcagtttcccattatgagttcatgtgtaatttaataaaatgttcagactattcatggctttcaaaatatattatttttgttacaaatgtattttgcctgatttttaatattctccatttcttcttctaattaatcatattaatcaattaaaatagaaaacgagtcctgctcagtgtaaaataacctcaagcccatgctgtttaattttataaagtactcataatgaaaaagaataatttagctaatcaaataacaacttcctttttccttacctatcttaagacaactgatcttctgtaatcactccttcagcctaagaatctattccgagctagacctatcagtagcaaaatgcattaatatgaatgctttagagctggaaagctgagagtgcctgccttctttatgtaactagcgatagaacagagcaacttgtcacttggtgaatttaaatgtctatgggaagaaactatggaatatctttatgatgatgaaattatctatgtggaatgtttcttaacaaacttggttatctcaaaaatgataggaccagtatcaaggcaaatatgggatagtgtggagactgcatacagagattattcccaaaggagtgaactttcttaagctaattttaaaattaatattaaagcttgaattttggccaaaagtagaaattaacatatttttaacaaaactctgaaaaggtctatgtcttaattaggagtatgaattggaagttaacattagggccacacggaacatataacggtaatggagaactattccaggtaaaagatagtaattattttgaaaaatgatgtaatgcaaacctagtcaaatgaaggtatgatgaaccagacattttctggcgcattgtcttcctcagtcttgtcctgtgacttctctaagccaatccaatcaattcccaaatatttcactgaactagaagttcagggatacgatagttaaaagaacctacagcatgcatttggtaagtttctcatgaagagacatgtcccaggtctggatagttgtttgtcctcatttggggcttgaatgagagcagtaggtaaaccatactgatgttttgatagataatgatccttgctgattcaaactacaagctgactcactgctgtaataacctaacattttctgaaattctacacctcccaaactcaaacccaaagctctattgctggtaattgactatatattatatctgtttttacatatgtgacaaatagtttagatgaaatggagtaatttgagggaagaaacaaggtacttagtagatgaataaattggtctccttagaaggaaagtttaaaagctggttattttggaaatactcagattgtttaaatatgcatctatgaacttaagaaattcttatagcaagaatttggaattgagaaaataatttttctcgagtttctacctaatacttagctcttatcaaaaaacaatttggcatatggatgccaaggttgacatagtaatcaatttaatttttttcttttattttcttttggaatgatgccatctgctataatgagatgaggctgcctggaaaaattgtaaagttgctgaccactcttgaagccacatcatccagtactgtgattttaaatttttattatcgtaaaaagtgtgacgtcgtgtctagggtaaaggctcttaaaaaattgaatttgtatcaaaagaaatgcagaaatgtatctaatttccctccatctcccaggataggccttttcagcttttaactctgtaaatgctccattttaagtgtgttagcaaagcatttttgttcaggctgtcaaaaggagcttttgtctagggaagatggtgggatgcgggagggagatgagtgtgtgtttttcctgttcatccgaatttataggaaaccccttcacaggaatgatattttcctgtaaagtgatcagtcatctcagaggataatcttcggattactggatacatatttggcagaaatcaaacagataaattgttgccagtcaattgtaggcaggtgcctggggagacatagtgttcctcactagtataccgcttactttatattgtcgttgatttgaatggaacaagtgtcatcgctcatctgttactctttatttatttttttcatccattactttttttttctttttttttttttttcttcttgagacagggtctcactgtgtcacccagtctagagggcagtgtcaccatcttggctcattgcagcctcgacctcctgggctcaagcaatcctcccacctcagccccacaagtagctaggactacaggcatacgccaccacgcctggctaatttttttgtattctttctgtagagatggggtttctccatgttggccaggctagtctcgaactcctgagctcaagcgatttgcctgcctcagcctcccaaagtgctaggattacaggcttgagccactgcaccagcccattcattactatttaaaggggcattttcattgtattctgtgtgtgttatgtatgttctgttgaagtaagtgaaaatccttggaaacatgtgagttttgttatgcttgtagcatttctgagttacttgttcaatgattctgttaaatttttaccattaaatgtgctctctcatctttttaaaaaaaagagtttgttcacataagtcctgggaattttttctttttgtgtgttttctctcctaaagttttccctgaaaaatttaattgcaaactcttatgatgttggctgaatatgtttacttttgcaagggcataattgaataggttctgtgcttttaaaataagtagcaagattttcagcatcctatcttggtaaaccatctatccatgaactataccctgtagtgatcattatgggaagaaaaatcccattgcatgctactctagcacacattcagtctttcaaacccactaatagcatagcttctcttcattctagcatccagagttctaggcttcaagattttaacagaggattttacaaactcaccagaggctagacagtgttaaatttctagtaatttattaattctttcaacaaaaatttcaggaaccagtggtgcatttctcacgtgaattaaattatcaaatttagaatctaagttgctaaaacaatttagtttttttagttgctcttcgtatttgttgtgttgaaataatttaagctagaatatgagagaaaaaaaacttccttttgaaactcagacttctatattttctgagtctggtataaagctaaggatattaaattctgaaaggggttactggtgtgcttagtaactgcctatagttataggataaattaagatagaggaggacattgagaaaccttttggtaaaatcctgcctatttcctcagaaacacacattttacctgaattcataggatgggttcctcttcaaaatgcttattccctgatattccatggcagaaacaagtttttaagggtatgaaatatgtggtttcatttaagcatggtataaatgattgtagaatgtgtagcatctattagggttggggaaggatctgattgatagtcagaattgcatactactgaaagtagatctacatgtactaagaagtatgttccgtacatcactcattctgtattcagtaaacactgctgagattatttgacatcacagtttttttctaagtcatgttcataatcgcctatttttgaacttttcctagttctaactaaattcgtagatttgcttttctttcatcctccacctccagtcattcatcccaaatttctaaaatttagtcctttataccacaaaacattacaaagttattttcacttgagatttcatgagaactactagaacccacagggatcctccctgtttctgatgttcctctgacctctgcctcctgtctgtgtgtactacatccccagactgagtcccagcgtcagctctctgagcttggtgtgatgtgtgcatgtccgtgggttcctttcccaaggcattgtcatggagatagaatggggtctgcaggtgaagagctattttgtccattgtgctatacatatagaagctgggctccacagagcaggtggttggaattaatgcacatttggtacctgggccacttgttttttttcaggcgtaatgattccaaaggtcagaatagagcaataatttgagatgtgccaaagggatatggagcatcagcatgtcccactttttaaagtgagtttagaagtatttaataaggagctgactgtgatctcttcttaccctgattaatttacacatgaattaaaaatttcctgtaatataaattgattgagaatctgtttctgctcctaaattgttcatcaagcatctactgtctgtgtgagagctggtaactgcttctttttttcttttttcttttttaggtgaacctaattaaaaggaaagattagattctatataaagcatgctcttttgtgcatataattatagagagaagaaataagggattcatctaatagattctggggctttgaaagagacttttgcatagttcatacatcatagaaagcatttagaaattacattttcagaaagataaaacagtattacgaccaaatttatcagagagattacatttcttaatttggaaatgtaaaatttttagtagttttgacaaatggttgtaaccaaaaggttatcagctaggatagaaataaaattaggctgctggtagattaggaaatcatgtagaattagacgatgtctggtaaaaattttgttttcctttcaactttgaggcagttagtctaatagaaccctcagtggagttagaagtgcccagaattattaggaagtgggcaggggaggctgcctcattacttccttcagctttcaatcagtacaaaatggagcttaaaatcaggctttcagcagacagcaggatgttccatatctacctatccacaaatattcctcattatttttagcctgtaactgtcatatagcacttaaacttatttttaaatgctttgctaatgtttcacttgagtagaaaaacgcacatgatattctataaaatttacctgcaaatatactaagaagaagaaaaaaaaactggatcttttctaagcttaatacaaaaggagtaacaaagaataacatatcttaaccagaaacagtatcatatgaatttactgttagtgaaaattatggaatttaaatacttaattttctgagcatcttagagtatgacttgcattgagaccttaaaaaatcaaatttaaaacaaacctggataaacaatgaattgttcagaggaaaggaagcaattacttttcagaaacaacatattcttctccatgctccctggcagagtgttttcaactatgatttgatcaataatctcacagtagtggcagatatagaaaaaaataaatgtttatcacacttgtaaacatctcaggcaaagccacagtgtttgctgagaagacaacgttcattcttgaatttccccatgggtcagatctggggggcatttactatttgacttgtaaggttgggtattaatgactcaaaccagaagttaatgcattattgtaaatattatgtgggtgggttgttgcctgacaaagtgaaatacagagttatgctgaattatccaaagggtgcttatctctatttggaccaataacgaagaccttgtcaaccaaaggaggtagggaaaagttgtttatttagggcttcttaaaaacaaacagatataacctacagctttttttaaagcctttgaaaattattcactccttgtaaaaaatatattttaattcatcttgggattttttttggcacttggattgatctctagattccatctttttcagaagaaagatgaataaattacttagagtataaacagatgagcaaatagcggcctataacagtgggatgtaaaatgtatatagcaagagctaaaagtgttggagaaggtaatcagcctttctcctttgcagttttttaaattcaattatatgtctcctgattaaatcataaacgtgtatgtgtctgtgttataaaactttccttcctcctggatctgatattagataagccatttttcttgatcatctttccaggaaggatgaagagcagcggagaagccacacttcttatcatgtatggctttctttatgttctgtgcaaaacaaagcaaaggagtgaagacaaatcaggtgtatatttggacatcatggggcttctaaaacctgggaggagagtgctgaggtcatttttcaaaagtttgatatcaaaaagccccaaggtataagcagtgaagacttaggtatccgtaatttttgtgcctgtgttactctctcagacccatgagagattgggtttaaactcgggtctcttgggagctgtgctcgttccccaggattttcactgggcatcacagcagcaaaggtcaactgctgccatctctctgcacatatatttgactctgcaattgtaggcataatgcaggtattttatgggttctatttgataacattgggccaaagtagaccttcctaaaacatgggagtcggggcatacttcgtgggacataatgatctgcagggaaagagttaaactctatcagcagacttgaaaacagtggtcttagtagctttgaattaatcgtttaacttctgtacttctttactctgctgtttgcttttatagcacatcccacatagaattctattaaggaatatgagctgaagctagaaggtccacttcaatgagtttgccatcaaatgatacaataactgttaaaatctttgtaaaatgtcattatacaaaagcaagtcactaaaaattaaatgtactaaattgtgtacatagaatgtcatctttcttacccaaggaatagtctttttttgtgggtctgaatgtgatttaagtggctatttatataagagaaataagtgattattctacttataaaatgagagcatatattttaaaaatttaaaaatactgaatacttaagaaatggcaggccttattcttgattgtcccaagttcttgatggtacatcgtagcgcttaatagctgaagaaaacaagcttttagcaacagtttttccaactactagtatgaataatgtgtcatatataaggtattatttccaatttccaatgtctggggatgtcctgcaggaagaagtcagagttatgaaaatatttatggaatcttatattcgcaaatatagtgtgaagaagtttacagaggctgtcagtgaaatgaaatcctcacagtataaccttttagtttgatgtgaggctgcatggcaaacaataacagagttctaagtcttttcatattctacaaaatccatctggtttctttgtactgtgtgtgttagaagaagcctggtgaagaatttagggtttgggggaatgtttttgaatacagaaatatagaaaagttaaatttgttagatgggtggagatattagagataaatattttaggaataagtaaatattaggaaatatatatgaagtagtgataatggtttatgtattaaacttcagttgaacagaaagagaaatccatagaactcttttaaaccacttattctgaggtgactaaaataataggaaagagaagtaaaaaattatttttaatctttctccatgatgtcagcccctatattagtctgggctatctaagtccttgaaaaatctctagaaaaaagggtggtgggcacttatcaaggaaagatgttctttgtgttgacagctgagaaaaggtagagatatattatagtagagaaaacaactaaggaaaaataacagaaactaatgcaaatttaatgctcttacactatcatcttatacaataaatccaacaataccaaggagacaggaggaaggatggcaagaaaagtagaaaactgcggagaaccttgtagctggggcagaaataggactgctagaaaacccccctagagaacggaccacccaaggccttgtcaagatagttctctgaacagaagggatctcccatcttttgaccgctatgagcttctcctgtcaacaaaattccctccacttcagttgcatttgaggcagaattctctgtgacaaattcctatcctctggacctggaacagtgctgcagctggccagcgtaccacaatttcctcagctgggagcagactgggcatgaagaattggaagtatccaaatatttttagtcatagaataagagctctagtatggaaacattcagggagaatgtcagtaaaccaaaatcctgacagtataatccttccctttatgaagtagtttaaaagagatttattagtatttgtatttaattaactaaaatcacatttatacttttaaaagcctgttataaaccagaagtaattcagtggccaagaagaagagaaggcttaatgaatcgtattcttgctgatttccactgatcctgtattatttaatttcctgtttttcttaataaaaaaggtgtcaattaagcacgatataaaaatattgatttttttctgccttcattgaatattatttttgtttcctgtgcccctttgttgggttattttagctatatgtaccatattctgtaaaaagatttattttttctaatgggccataatcattttgttttttagtggttttgtaatctatttttggaagagaatttgctcattgaacatttgtaagctcaaacagcactatttaactgattactctctactcacaagccttcagagaagaggaaagcccttttaaaactgcagtgatgcacacaggaagtgcatgattgtattattttcttatagtttggttgttgttctagaaaatgttcaaaagctttcttcttgtaaaagctagactgtcaattctgggactgtgctgtttattaaagatagctcttaataaatttctggtgtagaatctttagcgtatagaggtttatatattctggaattttaaaaatatttctctaaattctttagcttttcagttgaatataaatattagtggacaataagagatgtaaatgtagggccatgtatagtgaatcccagcactttaggaggccaacatgggaggatcagttgggcccaggagttggagaccagcctggacaacatagtgtaaaaccatgagaccccatctctacaaaagagagagagagagagagagagagagagagagagagagagatgtaagtttatgtttagggcccaaaaataaaaacattaagaatggtttggacaagcaatcctgaatcaatagctagtaatataaattaagcaaaaatgtctagcttatatttaaaaaatatgtatatatcacttgtggcatacacaaatctactagagagtgatgaacaagaattcaaggagaagaacacttccagcagatttacaggaaaggcatccttaccgagaaatggtagcttgtggttaagtttccccaagggaaattgtgggagcactgtcggttgagacctgatggaaaacttgaaaatgcgttctggggaacagccttagccttgtgctctcaatagtgagccttttgcatgttcatttctcagtggatccaggcaggagcaacaaaagctccaactcactctttcctgatgtatctatttttctgtgcatgtggcataggtaactgccttaatgaggtaaaatacacataaaataacttcacttgttttaagtgcacagtttgataagtggtagcaaatgtatacaaccatgtgaccaccaccataatcaggataagaacatatccattacccaaaaagtgtccttctgcccctttgcagtcagtcctcttcccctgacaatcaccaatctttcttgcactgtggtttttgcctgattaagaattttatataaatggaatcatacagcatgtaactgtttgtgtctagcttgtttctcttagcatcacgtttatgtttatctgcctaacctgtatttcaatctgtttccttactaagaactaatattaaatttctggatatagaataccaaatatgaaccctaactagaaaactgggcctgtctacactggaaccgaaattctttaaccatgttaaataaaggaaaagcaaaaatacccatgattagagcagtcattacttttggagtttatttctaaaccttattattgtttgttcaggttttcattccctttgttttacccctcctgaggtgctttccataataatatctatatttttaaataaaaggaaaaattgttttgagcttcagcattttgtgataatttcatagtgtctatgataatgtactatgccctgagttgtctcgaacccagactagaaatctttgggtcagaaaatgcttacataaaaaaattaaacataacttaaacctatatgtgactgtactataattttctttattgatatgaacatacatatagtacaaataaattatctaaatggatacctatttttgcatcctagaaaaatgtaaactgtgcattgaaaataattatcataaaaactaggacaggagttatttctgtagtcagactttagctgcatacatttttgttaagtatccaggaaagttttccacaatgtgtctctgaattactgtttatcgcatcctacaccagaaattatttaattagaaaaatagattgaagaggatataagaagctattctataagcgaaaagagactaagaaagtaagataacttgttggctgtcacatttagtgatatagtatttagaatatataatcatgtcttttacaaacgtgtaaaatgttctgtaacacttgaatggctgcagctgtcagctcattttttctggattaagtttggtcaagaaagaaaccgcctcattttctagttgtcatttgcccaggaagtaaaagcaaaattgtaatgagggaatcacagcaggagagcctcctaacaaatgagaggcatatattgactggcagccagcatgccatttcagtgataaatgtatttttatacactgctgttcaaggtcactcactgttgtccttgagtgtgcagccatcaaaagtcattcagttcacattctaaacagttctaataatcagtgcaaagatgcctgactttaaaaaatcagttattaattttatacaacatttatgtaaattatacatcttgatatttcactgcagtttcatcttgctattgttgaaaattgttgagaaatcaaagaagatgtaaatttatgaggcatttgtgagatgcattagtatagatttattacagtgtccacagaagccaaacttaaacatggatgaacttcagtaattaccccttctgtgttttgtgcttcttcagtgtttaaaattcataaagaacttttataaatctaagcattccaaaacaaagctattatcaatttaagactaatgctatgtttgaaatagaaattatactaaaaaaatacaaaaaaggacattttgcttttagatctgcctcaattcaaaggaaatgttgttactttttgaacaacatttaaaaagcactctttttaaagtcctttaaaaagtcctttaaaaagcactctctaattactcagagagagtgatctagttattcaccattttgttactcaaaactcaaacacactttctaaatatagaatgaacaaaaccatgttgttactcaggtttttgatctccataaatagcaaaatgttcagggattaatctagtattaaatagctgtcttttcaaagttaaattagatgcaaaatgtaatgatttggatcacacgaatctttcagtaaatattttttaaaatattatgattgttggatttaataatccttacgttaaatatgtgttcacagtgcatattcacagaaaatcacggggccctttatggtctgtcttcagactaatttgccaactatgcttatctgactccacttcattccttgcactgtaaatattgatcattctggagggctttttgtttgtttgtttttccccaacaagctatactctccttcctttaggcttttgaatatagtattccctccgcatggagggtgtgtgttatacccttcacattatatgtatgttatatcataccctccgcattatattataccctccacatgtgtgtatgtgtgtgtgcgcgcacacacacaccctagcctttgtaatcattcatacccagaaaatctccaaggtttctcacctggcctacacagtaatcccataatttaacttctacctgaggttatgggtgtaggaggaggtaaatgaatgtctccctgattttagcttagagctttggatgaatctaatatctaggagctccagataggtaatctcatacttccctctgacatcccacacataccaccctggcctagtaccacacatatattcctcctgtatatccagagatgttagaagttatatgtctctggtgtctacagtagacaattaagttccttggggctggcttggaccttgaaatgcttttccccatagaaactattataaatagtacttaggagattgaactggcactataaattctacaacattaagaattctcttggcttttggaaactggcccagaaatctatctgtcgcattgttcctgtttaaaggtgtgcagagttccaaacaactgaattccaaacaaactttaggacctctcatttgatggctgcccatgtggaaacactgcaacctactaaacgtaaaaatgtcactagcaggtcattttaaaaattaccacattgcatacggaatagccaggagtgacacagtaaatatacagaactacaaatagaaggatttcttgtatttaaagttatattagttatcaatattttacagatcaaaacagttcttacagtttcactcttttttaactttgcaagcagaatttgcctttcagtgagcccattatgacattgagttctgagtttttcatagctggaacaggaagtatgagtcagatttctcagtgaagtctaaactttccaaagatgaaacccataaatggcatttgtagttctgtattaactcgtactcacaccttgagttgaaggcctgtatcatatttaaagagtactcttgggtttcctggttgacttcctttgtaatttaacctttggcaaagcagttataaactctgacacctgaacagtcataaattaaaaatctgtattttataataccgtgtcaggcatcttaatgtacaatgctgtatctaaccactaatctcaattgactgttaaatagaaatgtttagcataaaactattatcatattataaaaaactgtttaaaaaaatgatgtccttatcatttctaaactataaaagcaactaaatgtatgttaaataattttttttgttaataatcttccttttttaaaaaaagcagaagcacagttttagggagcatgcatttaccatataatattacacttaccatgtaatgttataattttaatttcaacatttaaagtgatctggcaactatgactctcatctctgagcaagtaaaatatttttatggaaaaataaaatagtgcataggagtatgaaattgtttataccaggaaaatctgataaactttaagatttcaaagacaagctaatatgaaatctggaagactgtaagccagtgacttatggtggttcttctgagggatgggatttgatgagtaagtatatttgggtagggttttcagttttattataagtaccccaaaaatagtagtactataggtaatttttagtttctttttttatatttttcccggtgtttttcaaagaaaaaaatatttaaatcaggggtgtcttaatcttttgactttcctgggccatactggaagaagaagaattgtcttggtccacacacataaaatatactaacactaatgctagcttatgagctaaaaacaaaaaatctcatcttttaagaaagtttatgaatttgtgttgggccacattcaaagccatcctgggccgcatgtggcccatagaccacaggttggacaagcttggtctaaataaaaattatgcttctactaaaaattatttttgctaatgcaaagttcatatataaagtcttttaagcctcagaagtgtgtccaaactaccttctcatatacttactcctaaaggaaaatattatattaaatggaaagcttctggttgagttttagatgcttttttctttaaagtgaataaaattagcatgcatagtattaaagtgtgcccttaatagcatctgtaataaggcatagaatgttattttaaggcacacgtctctgggtcacatgcatgatagtaattatgagcagattactaacaaagtgcattctgtgttataaacagagagcatcacaggattcacgtctgcttggaaagaacataagttaaaacatcaaagcagttttttttttttcttcaagattgtagttatttagatagcttgtcagtggtagtgcaacaagtgggcttgtgttattgattttcacctgtattaccacaacatttttcattgacaaatattaattgcttattaagtactaaagagtttgatggtccaaatattgaattttgtaatgaattgaccttttagttttgcttatcattaggcagtatgattgcattaaagatacaaaggtttaagccaatatatctcccactttaagaacattaaatagatattcctctaaaatttaattttagtgataggatattcactttccctttcattcaggtaaattacctttggccaaactatagggaatgcttatataaatatgaattgtgtggctataattagtagtaaagtatccagcattttttgcattgattctagcttatgaatacagagactaattgaaatttgtatcaaaaccaaattggtgattatgatcactaatgtagattttttaaagtcattaatttggttaatttttttgtgtgttcgagaagaatctgcatatctaagtgagcaaccagtacatatgtgtgtatgtatgtatacaggcatgtacatccacaaatatatacaagttccagtttaattccttttttgttatctttcctaacttttttttttttttttgagacggaatctcgctctgtcacccaggctggagtgcagtggcccaatctcagctcactgcaagctccacctcccgggttcacgccattctcctgcctcagcctcccgagtagctgcgactacaggcgcccgccacaacacccagctaattttttgtatttttagtagagacggggtttcaccatgttagccacgatagtctcgatctcctgacctcgtgatccacccgccttggcctcccaaagtgctgggattacaggcgtgagccaccgctcccggcctcctaatgtttaatagtatattttttctttttataattatacttggagaaaaaaataattatacttggagaaatcttaagtatattatacattgggctttctaaaacataatttgtggataactgatgaaatttaaagttaaaattagagaaattagagtgttttgagttggcaagtatttgtagattaaaatgttaaatttaattcaaatatatgtttttgattgcagaaatttgactttttaataattgattttctgatctctgagtcagataattactacttgataaagggttatcatttaaaagtttaaatactgtcaaccttcaaagcaattttgttattaactacattaatttatcacaaaatcctcttttaaaggtgatttgtacattgggaacaaccttgaaatatttaatttaaaaataaaatattagataaaatattatatttcaggtctacaatgtgtacaatgagcccaggtctttcttttctgcccaccccttatactgctagtgtctcctgtcgttttatcctcatccttttggtcttttcactctatctactcttcatggactttctcaaccatttacattggattttttaacaaacattcctggagaagctgctgtgtaccaggaacagggctgagtgcagggtctattccttccacatctctctatgtgctggttcctcccaaatctgcctttcttttcataaacctgttcctaagctccaaattcattttcctcactctctaacatatttctgtgtgctcagtccctccacctgaattctcacactgagctcattatttcctctgacaccttcccactgatccctatccgccgcgccctccccagggtcttctttcgtttgtgccttccctgtccaggtcacagcagcaccaccagccccgcttgccctctccttcctgtccatgcccacttcctcattcagctccccatttctctgctacatttgcttcccaacaagtccttcttcctttctgtttccctcttctccaccctctgcagaattttcttaaaactagtctgatctgaccattctcatatttaaaaacttcagaaaactctctattgactatgaattaagtccacatttcttgacaccacaagaaggcggcttatagcctggccatagctgcctttctgcctcgttttcaagcctgcctgtctccacctctcctcgccccctggtgctcccctaggcagagtgacacgggagtgctggccgttttcttggacccctctgaagtcttcacttggcacatgtttgcttagactcatctcttgttcttctcaccaacttctggtggtcctttaaagctcagttcaaatacaaccttctctctgtacctttttctgacatctcctgccgctggacagaaactactgtctcctcgtctgtgtttctgtgacatcttcagcacatctctattacgctgttgattgcaccataccatagtcgcttactgtcaacctgttggtctcccattcctagattcactggcaggggtcctatctcatctttatactctgatatcttgcacaggacctaaaacaaaaatctcagtaaatatttttaactacattttcctaaaactatttaatcccatgaggtaggcaagacagataatattattttacaaataagcaaatcagaaaattttacctattcataaaaccagcaaagacaaattttaatccactaagtgaaagtggatagtctaagtataagtcagaggactgacaagtaatgtcagtgttattttgccacagtaattactctgggagatttgcaaatgcaattgctatgtgaaaaaaagacatatattgcatattttatgaatattatgattttaatagaaaaatgttggatgttatatcaaaagtagaaggttaattttatctttttgtaacttggtatttctttatatttttattgcatttattttgaacaatgcaattgttttactattaaaattgtattgggaaaagtaaaaatgtgaaaggagctttaagttagaaggtattcattctagatcagtctctaagaagtcaccatcatcaagggaattcactttttgtttttttatttcaataggttttgggggaacaggtggtgtttggttacatgactaaataacttggtatttcttaacaaaaggaatgaaccttgtaatgcagaacaacatacaacataaattaggttatgttccagactaatctaatttttcagttttaataagtggaagaggcataataaactacacataaaagtgtaaaatttctaaatctgtaatgtgtcctagtgaatatgttctatcattatccaaaataaacatgaatccaaaggtatggtaatgttggttaatatatgtatgaattttagaattttattttatgttgtaatgtaacactttcaagcatttctcttttcagaatggtgaaaatgttaaatacttttgaaacataatttcaaaaaatataaattccctagctttataatctacatcagacaattttgtgtcaccaggcactataccaggcaaaggagaggtgacaaaggagcgggaacacatgtgaagatcctgacctactgctctaaccaaaccatcttccgttaaccataacccaaatcaaaacccacgaaaatgccaagtcccatcatgacggacatttacttaggaatgtgattgctgtccagtgagttagtgtgtacatgtgtctgctgaagtcctgccatgtaaaagcctgaaatgtctagaaagggtggagataatcaagaccattcatgctgctgaggaactccatgtggaagcaggaggggagggatttattttcatagcacagtataagacttctagcatgtgttcaaatagttttctattagaaatactgaaaaaaacatttagctttgggtttgcccagatctgaagaaaacattttgtgtgactttttaggcatatgcaagtgaaactttaataaatatttcatatgagcagtgtaaatatttgataatttattcactattcttttatttaaaacaaccacatttatctaaattatattagtattcagcagtagagtgtccatgaatcatctttaagtatggctgtgtaattatatttttaaatgttaaattatatcaaaacgttatgttttcatttatgtctttaggcttttttaatcattattgagtctaaaagttgtacagtacaaacatactgctgtcattttattagccaaaaattggtggtgatcatataatatattaacttgtgatgtttgggatttttagcaaacctaattttcaaagtatgattctatataattaatcatttcaacatgcaaagaaaagacatatcaattatgtataatttaattggatattctattgttactttatcctggaaatattgggcctaataaatcagaagaacagggaagagcaaggctagttcctgattatctgcagcaagaaaaggggaaagaagggcttagacattaataggtgaattaatgtctaattgatggagaacttttctttgaatctggaagtttcccagttaaatcgaagggaaaatgctcctaaaatcagtacctattttttagagtttgctgtatgatgattacagcgtttttaagtttggtaagcaacgattggcttaaatgtttattctctatttttctattcataaaacttccttttaaaaataattttgataatttataaaggatcttagtgaaaatataagcctcgataccataaaaaacttattaggaatgtcaaaattacaataatacaatagttttgagcatgtattttgattctcactattcctagataagggtgttgtatgtgtatatgtgcatatgcacatgcatgttaatatataacccccccacagaagaaatattgaaaactattacttgcatcataaggattgtcaatatgtaggtagtgaaaagctctttcaattcatcaatgtcagtttgtcctcgaatgacatatacgtaacttttagtaactgaaaatgagcagtaaacactgaagctagttttaagaaataaagagagcctgtttacttgaggcattatatcttacaataaaacttaagatagctcactttattatatttatccttaaatctattttccattaagatgttaaaatgatatcaagtctacttgtttttccctctgaatatatattcttttcaattagatggtgatagaaaataattcattgaatagtttcaataccttggcttggaaaatgccaaaacaggttgactttataacataaagttggcataatgtgaataaaaagcattgcctcagccctccatcaagaaaagaaattatagagataaacactcggttttcaactctcaaatctctgttcaaaatcattgtagaactgccaaagggcagcatctagtcttatgtgcgtagactataggagatagtacacccaataagaaaagctgagttcttttcaatactagagagttttaggattgcatttaccatgtacttccattttggtcgatatttttagtttttatattttgcgtcccaagtgagaaagaaacaggttcctaactctaattatcctttacttaaaaagtgcttatttatggtccttgtaggaagatattgcctctttgggggtacagacaagctgatgggagggtgaaaaccttcaggcactgaggaccagggagggaggctgctggtgagagagatggggctaccatctctgtaacctggcctgggtatctggggaaatcaacacaggtgccttcctcctccttagccagtgaagaaggccaggacaactctgttttaagaggtttgaactcctggaggtgggtcaaataaaagagtgtttcttcatcctcactgtgacagtgggccagtggaccctgcctcaccccacacgaaggcaggactaccctgggaaaatgggcttcctatgtcccaggcagtgctgtcatcccagccgtcctcacagggatggcagggtaggggagattgccgtggaccaggacagcaccaggataggaagggaggttgggccaatccagggaccttcctgtgtatgtggaagccacctccatgccacatggggttgggagtctaggggttctgcgaggtcccctgaaattcagaagggtctgcaaggtggcctggctgactgttgcctgtccagaatgaggagacggacacttctgccgggcaagctccagcaccgccacaagctcttgtttccaagcagccctgctgtagctgcctgggctggggctgcacccagcctccaagcaccaccagacatcactcaaggtctttgttatttggtgtggcgaagtcacttataagtgttagtgtataatatacataagactttctcagctgtaggaaagtcaagctacggaaattgaagatccagcagttcatagctttcttttacctggtattctgtgaggcagcagactctggccccagactgcctggattctaacccaaacaagttatcgcacctccctgtgcctcggtcccctcatctatgaggtggggaataacatagtctgcttatctcattgggttgatatgtaaagattaaaaagtttatgtaaaagtgtctggaacagcacctggcatatcatacatgctacaaaagtttgccttcttagtatgctttttgaattctctatagcaacagtccccaacctttttggcagcagggaccagtttcatggaagacaagttttccatggacctgagtgggatggatggttttgtgatgaaactgttcctcctcagatcatcaggcattagttagattctcataaggagggcacaacctagattcctcgcatgcacagttcacaatagggtttgcacacctatgagaatctaacactgccactgacctgacaggaggcagaggcttgcttacctgtcacccaccctcctgctgtacggcctggttcttaacaggccatggaccggtaccagtccatggtccaggggttgaggaccactgttctgtggtatagcatagtaatgcatgtttacccttccatgtacaattttaaaatttatttcaaggatgacgacaactgttttatagttgacctttgctaaatccactttttgttttaaattaaagtattacgttatatgatgcaattttatcaagacccaatggtgagacagaaactaacctctttaagcacccaggtgatatgatgtaagtgttgagaattagtaaattggagaagagagaaatagaagagggttaacgagcaataaatgaatgggagtacatgtttaatgaaaataaacagggtgcaaaatgagtactaatgtattttggaaagtgatagaagaggctttagagcaggggttgatcatctgggtttttgtcagtggatgcctcttcaagatgtttctgcagccccaagacactgtccattggcttaggtgtgcacatctcactctcctaaagataacggggagcactgcagatgcagccatctgcatgccaacaactgtacgagtttttccttttcaaggagttctagtaaattatcttttaatggtgatcatcagccacaattgctgttttctgataaaataagcatatgctggccaggctgcatagggttatgagaaactgtaatgacatctgatctaattccagtactcagtctggtttgaaattccacatcttggctgggcacagtggttcacgcctataatcccagcactttgagaggccgaggcaggtggatcacttggggtcaggagttcaagaccagcctggccaacttggggaaaccctgtctccaataaaaatacaaaaattagctgggcgtcatggcatgcacctgtaatcccagctactcgggaggctgaggcaggagaatcacttgaaccttggaggcagagattgcagtgagccgagatcgtgccattgcactctgcattccagtctaggtgacagagtaagactccatctcaaaaaaaaaaaaaagaagaaaaggaataaaagaaagtccacatcttgaggccaggtgctcacacctgtaatcccagcactttgggaggctgaggtgggtggatcacctgaggtcaggagttcaagaccagcctgaccaacatggagaaaccctgtctctactaaaaatacaaaaaattcgccaggcggttggtgggtgcctataatcccagctactcaggaggctgaggcaggagaatcacttgaacctgagatgcggaggttgcagtgagccgagatcgcgccattgcactccagcctgggcaacaagagtaaaactctgtctcaaaagaaaaaaaaaaggaagaaaagaaattccacatcatgagatgtagttgaataaggtgacctcaaagataccatccaactctaagatgtcttgattggaaagcttggagagagtttaaggaaaatccactgaaattattaaaaagttgagaaataaaacctgaaaggaaaggttatagtcactgggattttttttttttaatcctgaaaacaaaattaagtaaaagagggggcaggctgctgcaacagtcctcaagcttttaaaaggctgtcacactaagattggtcaccagctgttctccatctctactgaggccaggaccagaggaagcaagcttcaactgcagtgttttggatttagatttgatataaggaaaaattccctgacagcacacattgttaaacactgaaaagggtcctcaggggagatgtgggaatctttctctggagatatctgaaaacagaatagattttcatctgtctgacctgcttcaccgtagccctgtccacacacacagcagaatgggtgacctttcagtgttcttggcaacaccatgtgatcttaagagcctatgcacaaagagacttgagaaggcttagttcatcgtgataattaaattggacttgaaccttctaatcggccatagatgagattatctgttttttaatggcgttattatctgcctaaattatttgttgaatctataatttgtttccttgagcagatgaacctgaaatatctaataaaattttcacaaattgattgcttgggagaaaagaagggggatttttttttcctggaacataattaattcttaacttttaaactcttttgaaatggctcttttttgatgagcctttcccttgcctaacagagctgtcagtcagagcgatgtctttgtcttctctctgccttgagcagttacctccctgccagccagccatgaaatctacgggctcctgtattgggatgtcagaaaggcatgcaaatcagagcctggttccccctccttagctgcccttttctgacttcagctgctgttaacatgagagagatgccaaacgtacgatgagtgctgcaagcacccgctgcacctcacttggcgttgccgggtatcattaagtgggagcagcactgggaagatgtgggtatttgcaggtctttggtattgcctctccttttgagagttcttcctcacttctgaggcactgactgccttgaatttctgacctgtcttacctattttttgactccatacacacacagacacttcattcaggctcaccctaaagtcagggcatctgccatgcttgtaccttatgaaaacaagcttgtcctgtttgccctctgccggagcacattctagggaaaatgcctcaggtgaaggcataattgtgtttttcgagatttcagaggccacgtgcagccaactggggaggacgtatttcggctcagcagacctttcaagcgcccctcaaattgcaactgcctgacttaatctaaagtcagccacactgcttcctgagaagcccacagccacaccggccgcttccctctcagcccctcaagatcttgggggtcatcaaggttcagtccacgctcgtgcatttttccagtttatgttactaaatgttatacaaaatacatgggtcagtactttatgaatcttttccttgtgctggtatttatgatagggaaatcttacctacttttggaaatctcgttttcataatttatgttaagaaaatggtttagataggattttgtgttcccccttaaagaaaaaaaaatgatgagacctacaagtaaacataagatgttctctttaattttattcaacctcaaagtgggttggtttcaagtcccaaacttgtcatttggaagctgacaaaccatgtgagagcagttttaaagagaatattctagaaagtcatggcttttattgacgctgaccaaatcattttagaaattctcatttctggttccttctctgtacaactgggttaattatatttctttgcagagcacattgaaaatgtgtgttaaaaacttgggtacattaagtattgttcattattctgcttcccagttccttttctttaatgagaaaaaggggtgggggtgtttaacagttcaacactcttatctcctgctaggaataattgcttgattttttttaattgtttgtagcacttcctgaatttgattaatttctttatattccatttctgtcttttcaagacagcaatttctttgactaaaaatataacaaggcatgatactcattcgcatataaaaagtctaccaaacctctatttatgttgaaacttgtttgttttttggaaaatgttcttcaaggtctagcatttgagacccaaaccatccaatccgctccatcacaaagcacttacaagttctgtgcgatccgcacagctgcatctctaatgccagagtagaggttaaagtcagttcaggtggtgcctgcacagatcttagaagttcagagaatctgaacaaaagacaatggcaacatttccattacagtgagggttgaagcacctctcgggctgagattgtaatgaactcaccagatgtaccaagccatttaaaacagcgaacttccctgcactgcttgagcggtgcttgctcttacgagacagcaggtctgtctgtcagctgcagtcagcactctgtggtttttctttaggttgctttaaaaagccagccctgtagggcacctagcagcatcatgctgtgtgtgtgtgtgtgtgtgtgtgtgtgtgtgcatgtgtgtgtgctgttcttatccaagtcatgctgtgtgtgtgtgtgtgtgtgtgtgtgtgtgtgtgtgtgtgtgtgatgttctgatccaagatgtagtccccctttgtccaaagaagactttcaagaaagttaaactcagtatatgacaggacttcaacaacaacaaatgaaaacggaacagtgatgagtaaaatgagtaggaggaagtatttattacttgatctacatagaatgagcataaatttagttctgagtttcctggcagtaaagcaagacagtgttaggttatgtaattattgttacatgataaatgaaagcaacaaatttatctggaaagacaaacattttcccagcagacaattcaggctgaacttatttcccaaaatcttctttgagagacacttaaataacaatgatcagtgtcttcagctgaaatagaagtacccttcacgtggatgttttaaatactcgccagaggaagacaaaaaatggaatatttagagaacactgttctgaaggagcaaatatggtcccagtgagtctgttttactacttttacaaaaagctaacttgctagcctcaaagaaagggttgtgaatgtgtccactgggttgtaacatgctttggacctggtggtttatagcctgcttactgttatgttctctaacttactgaagcaaccttctggttgctgattaaggaaggatgctaatctgaaggaggaaggcttggcattctgttttgaaactgaggggcccaatctccagaaggaggctcagtccacctctacacagagttgggctttgggggctttcaagaagggccagtttttcttagaagaacttttaatctactcacagttttagatggatattaggatcccagagcatggaagaaactttgaattttgaatcaaatatttgtaatagaaaggttgcattaaatgccaggagggaccaggtgggaaataagtgagctgggcagcctggtacacaggtcttcttttgtgtcagtgctggactggtgaagtgaagagcacatgctcaggctgaagtgctcaccaccactcagccctggctgatgctgccacatgtgaacagaggcccagtattgtccgatcctccagtttttcaggagaggctggaaatcttgtttttacagaagatctgatcaattagaaagatgggctgaaaaaatttgttttttgcacttttgcaggccaaaccaaacacatctattatctaatttcaggttaagggttttgagtttgcagcctctaagtcaaggacttactgtcctactgtctttactataaagtgtcctcagattggcccaatagaatttcagacttttagcagaactgaatcttgatgttaaaaaacagttaaaaatgctttcccaatgagctgattaaactgacctagtaagtgggaatggaccactttttccgatttaattggtgaaaggcttttttcctgcctgagtgattctcattccagaatagttcatgttaagctggtttcttgcgctaattatgcagcaagtgcactccatttcttaaattagtacatttatgggccagcatcatgagtaatcacatctatttcatcaaatgccacagtctgaagtctgtgtttgtaggcaacctggtatgctacgtgatggtgattctgagatatgtgattaaggcagagttttggagaagggttcattgaatagtgtactcaagtgattgagttatatgactgtttatatgtgtctggtcaactctaagcaagcaggagtaacaaaaatattaaaagtattgaattgttatatgccatgcattgtgcagaacgctacgtattacctcatttaacctttacaaagctctttgagttagatattatcattatcatcatcatcatcgttcctactttacaaacatgggtactctgcaatgttaagtttcttaaataacgtggccttaggttccacagttaatacgtagtagagctcacatgcaaacccaggaagtccggctcacatcaatgctctctccctgcccagagcccagttctataccaacataactttttttttgagtgttagaaaacaagtgttatttgggacaccacagtcccttgaaagtctaatgacaagaaaggacagaatgcaaaggcagcaaggaatgtgcttgtgtccctacccctgttttccctcttcttcttcatcttaggcattcagatatgtaatatgaaaaaaatctcctgaaatgtacactacctgtgggccgaaacacataacaagcctgatgctcccactgagactcagggctcacaattctttatcaaaaatgacagctggaagtaaacctgtcctgaattttcttagtttaagggcacacatttcctattcctttctagacaaagggaggagaccaacctacagcttgtaagccagattgaatattggttattgtggcagaggtatggttttaaatagttcagtacagggagattaatacaatattatgctaatttgcttagtatccaatgtcttctgtaattattaatatcatcagacttgagtattgtttttattaggagggaccttctatcaaagacctagtctaaaatacaacttcctttttattattcatggttaaatcaatgatagctatttggcagaggttcaaaactatccctgttaacttgtttttaatggtatttgatttatgtgtgtgcccaaacctcccacatgtgtgtggatgtatatttactaattgcagctatatacatttaaatacagtgttattggtagaaaatgaagcataaagcatgagcagtgtataattattaaggagatgaaattatagtctttaactccttccagaacagggatttttataacgcagctttgattgttttttatttcagatgagcaaagttcctggatacttctggtgatcagtttcttacctttctaactaattgtaaaatttttccctgtggtggacataaatgaattagcacattggtttgcctattaatatatgctttttctttgggctcatgctgccctccccaactaggaggcaggtggacacctcagaacaagattgaagcccttggagagttccctcaatgagagaacgtctgttgctttgcttatttttctaagctgattttataaacaaagaagataacagcatctaatacccatgacgtaacttgttcaacattgaatgcatttgtgtgtgtacttgtaattgtcctgtgaaatgcttatcattcatgatatctgaattttattttagacaatccatggacacaagggaccaatcactgcagtggcttttgctcctgatggaagatatcttgccacctactcaaacactgacagccacatttctttttggcaggtaagagtagatgctccagggtcttaaagcatatactgcgtgatatgcctttggtagtaagccttcctgttgagcctacctgccggccctccttcctgtcctccctccctccttgcagcaaacatccagtctgtattgattgctgatgatgtgccaggcactagcatgcagggtgctgagaatacaattagcaatctggaaagaggggcatctgctctcatggagcttgcagtctgaagtagacatacataaataagcaagcaattatggtcccaggggagcctgagaataaggtggtgggaaggcttttcaggggaagtgacacctaaactgaggcttgagtgatgtggaggaagggctcagtgttcagggtgggtcaggaggtgtgggtggttaagaagggggcacaggtgcatgagtagccgtgagcaagggccggcatgtttgagggcctggcctgagaggaatcgggcaggagaagcctcgctggcttcagctattcatttacacgaggccttcacacttggtccctgggtctgtgactctaacagggtgtagggcataggataataaggtgttttcctagtgttcacctcatgtcccttttataattatctcatttttctttgcattctgaatttcccacataatactcataatgctcaaactgttcagaacatttcttaagatctcacgtagtctttggtaagcagttcatgagaatgcctatgtttagttctgaataaaatgaacattaattttgagcaactaattttggcaatagaatatgtttgatcctcactgcttaatttctatcccatcttctttttaattaccttactcttttagtcctgaaaattaccaagaaattaaacacccccaaaaaagttaatttaaaattttgttgttacctttattttcttagaatgccagtatgttttatgagattcagtttattgctttgaaatctaaaacaaaacaaaataaaagtttaaacaaggcttcagcataactgggtgatagttggaaaaaatcaataggtaataaaatgtaaaatggatacaataaattacttaagtaacaacgtgctattaaagcatgacaacttcaaaatctgtcagacttcttctacttttatctaatttagttttccagtttattttctcattagcctttcttccagaatatatctccagcatcttaattcgctcatattaaactccctttatcagagatctcacccagccctcattttcccagtgagtatccacagcactggtgttttccactcctgaaattccacagtgattccattaggtgtccagaaactgggcttttgcagcagtggttctttaaggattttacctactgatttttttggggtcccccccgccgccactcgtgtctaactcaatggcctctgttatgtcagctgtaccttcatacaaattttcttttatttcctgttctcttgggatcttggaggaatatttatataaagctccactcattccacatttattggatgtctgagtggtaggtactggcctgtgcattagagacacagagatcagtaagtcatgggtccgtgcttgccagaaacctgtgttctgtccagggtttcttctttggaataaacaaacaaaacatctcttttttccaactttctttctgctaagaaaacataatttcttatataagaaatacctcacatattagccagatttgaaacttttcccagtattttcaggagtattttaaatgaaattttctaaatgttaaattatctttttcccctaagatcttcaaggttttatttggatatgctcatcccttccttgaatatttttctatttatatcaaaattactgcccaggtcactgatgggattatgggtaacatccttttcacttagagaccaagctcgtttattagatggcttccttttcaggtaacatctttttgtcttccagttcctctctgaagcctcctgctgttgactctgggctttgccaagcgcactcacatctgtgtgcctggacacgtggctttgcacacagtggggctgcagtacatgtccttaatccacaagctcacctactccaagggctgcttcctgttatttgcacatgccaaagccaaagcagcccaggcaacacccaggtcattcttgcctctaaaaccaatgtcggaatttaacatacagcccatttcttcatgtttatgttgtaccaaactcagtcttgaaattttaatggaagatacaaaaacaagtcctttcagctttctcaggaaaatgcaatgaaatctcttccagaattgtagttgtcttatttgaattaagagtccaaaaaacagtattagatctactgctgctctccccaaatgggctttgctgatttatttagatacatgttgtttcgttgtaatgatgtatcagaatacttttatattattccagtaagtgtactgtaatatattttgaaaagttaatgaagtcttattaatacagagccttactaaagctatcagctattaaaatctttgctgagaaatgagtgttaatgagaaatattggttggataattactcaagtgagacttagtaaggtctgtgtgcagcattacttacattgggaatagcattaaaacatttcctgttgtgatgaattatagctgtgtttctgtgtgttcagaaaataatcttcaaagaaccagttttgtgaagcgtttatttttgaagggaagaaaaaagccaaagttacacttgagtgaatttacattctcatctatcaaatgatgtaatttggcagtctttcaagccctttgattttctaaccccgttttctacaatttgaatatttcacttctctgtatccattggcatttgagcaagaggaggagtttagtaatgaaatacagtcacaattctctcacccaaatcttaccaccactgtccagcaaatatcctttttcagaaatgctgataataaattaggtagatactggtttcgtttatttttatttactccattgtatagtagaatactattcagccatttaaaaggaataatgtaaatttgtagtcattaacaagagaagactgccatcagcattttgttgaacaaaaaggcaaattatgaaactacattttaatataagcttgtttatataaaatttattaactctgcttctcttcatctttatgtatatgtggaggtctggaaggttgtttaccaaaattttaacagtgactgtctttgggaaaagatatttcaggggttttttgctttcctttttgtacttttctttattatttgaattttccacaatgagtatttactatctttgcaatcaggaaaaagtgaatgttaccaaatctcataattccacatagtttgcattcattcaaggctcaagatgtccttactcgagcatcgtttgtatccagtcgctgttcaagaaaacattaatattgaaaaaattgttagttgtttcagagagagtcatttgtctgagtttattggaaaaattaataccgttactataatacttcacattcatgccgaatttgaagaggtcatagggaaaggatgatcttgagcaatgcattttagtgaacatgggggtctttatcgttccacatgttatgtcccttacaggatttcacatatccctattctcagacaggaatagggatatgtgagctatgatagttatgtcccttatagaatttcacatatccctattctcaggcaggaatagggatatgtgagctatgatagttatgtcccttatagaatttcacatatccctattctcagacaggaatagggatatgtgaactatgatagttatgtcccttacaggatttcacatatccctattctcagacaggaatagggatatgtgagctatgatagttatgtcccttatagaatttcacatatccctattctcagacaggaatagggatatgtgagctatgatagttatgtcccttacaggatttcacatatccctattctcaggcaggaatagggatatgtgaactatgatagttatgtcccttatagaatttcacaaatccctattctcaggcaggaaggctatttgacctgaccaaaggcatttatcaaagtagggatggctcaggttataagaggaacccagttgtaatggccttttctaaaatctttacatctagagtattcccatgagatattctctcccttttcatgtttagctctcaacccattttttgttcctggctaaatttgaagagaggaattaaaaataaggaagtgtctgagcattatatgccccttgcattttgaattaccagcagaagtcaagcttcatacatatattcatagaaaatccataaagaatgaaaaataccttgtagttatttatcaactgagaaattagattttttctaaaacacactacgcctgttgatgccagttaatgttaaccagcaatcttctgtgtcatttggatctatcaaattaagctcatcatcattatttatattttaactatttgggaacatccaagaaagcaataaggcattgatttttatcttctgtgaagtttttgggaaaaggagagaaggaagcaaagaaacacgcttctgaaagggtgacagtaaggaactgcctggctggaaacaggaaccgaactttaacagaaagagttaacaataaccatacatttggttttaaaatgtgacctcgtacactagtgattttttttcacctctgtgttgtgttcagcgctattattaatgcaggaaaatcagtaacattagtcatcttaaaagggttattactcaagatgatttaaattgtgaaaatgtcagtggagcctgcacacactctgctagagatgccatgatttacgccctctgacaccatcctgctgctgagaagggctagaaaaaggaatggcttgtgttttgcactgatccacatgcaggggatgatgtcagtgataacgcatcttaaatgtcctaggatttgccagagtttcatggatcaaccatttgtagatgttggatcataatctgcatgcttcatgcaaatctctagaatcttacatcgagatggaggttatactggagagaagcattggaaatgaaaattagtacaaagaaaaagtgttatttccaaggcttctttccagattttcagtattctttccatgtgatattataatagcacacataatgctattgaagatattttaagtaatatttagaatctaaagaaatcttcagactcagttgcttaggaaacagttcacttagacagctaccattcagtatttagtacttcaacctgaatgcatagttgttcatgattcataatttccatgttgtttttcatttatgtggctggattaagaaaacctaaaatttaaatccagaaaaactgccaaaaagcagaagttatcaattgataaaaaggtattgtcaataaaatattaacagcagactctccttagtatgatagcaaaacagtgaggcacagacatagtgttgagatgaaattgattctggttctgcactttataataagcaagagctttccagaaagcgagtttttaaaaagcaagtgaagagtgaaggtattagtaggtgggaaatgggggtggaagggagtcttgagctttatttgatccaattgtcactctatctactgcttaactttgcttccttttcttgaactaattacaaatcccaaaacttgtcttcgctgactcatccttcagggagtgagtgcagttagcattgtggtaaagaacatgaaagtcttcagttttaaatatccacaatttccaaatatctgtgttgtctaaatgaaccattttattaagaggtataatttagccctcttcctaaagatccatggactctccttttgtcaggttctacccctataaaattcctctagatttctgcatttaccataacagcatcggaacaattccaagcacactgaaaggaacttttgagaggttaagaacaagcttaggtgaaggagaataaccatgatggaggggaaagtagccaggagagatcgacccagtctctgtgatagggaaagggagagggctgttcaagtgacacatgtgctctcctgtccctccagatgaacacgtcactgctgggaagcatcggcatgctgaactcggcacctcagctgcgctgcattaaaacctaccaggtgccccctgtgcagcccgcgtcccccggctcccacaatgccctcaagctggcccggctcatctggacttccaaccgcaacgtcatcctcatggcccatgacgggaaggagcaccgcttcatggtctaatgctgctgcctgccgccgtgactgcgttttagttctctaaattatccaagccgatgttgctctgtccttcctcacaccagattgttcccaggggcctgcccaccccagtgccatccagtggcacggccgggtcttgtcacttgtgcatgcttctcaggggcagaacccgctcgtgccatctgtcgattcagaggcacgcacacatgctctgcaggatgtggccatcctgtcaccaggtagtttttccctgccagagatggcaggggaaagccagtggttcctgggaacgctcttgttgcttggtgcaacagaagcacaaaaatcaataaacactgtgattgcactcccagcccagatcagcatttttagccatctcaaccgcacctctgaagtgctgcttgaatctggccgttctgacactgggtgttgaggtcatgtggcagtcctcacgattgaaattattgccctttgaattacctaaaatattgtttaccaaaaagattctgtgtttacatgttcttttcttctggtgattgctaggaaattactcaatccaatttcctagggtttagctaccaccttctttatcaacagctaaccaatttgagattcatgattaattatgtacacaaaaatattttccttgtagaaaatagttttccagacacttagccttctgaagtgctcatctcttgcttaaatgatagtctatttagtagtttaaaataaaaataatcactccctatgatctagttaatgtaattatccagtcactgtaactaatctcttgaagggacttttgtgataaagagccaagttcagaagcatagcgtgtaccgaaaatgaagactctcctatctactgctacagatcctgttgaagaaagagcttacccctttcccccggaaaacttgcaatcctgtagttcccatatgtgtggcatatgtcagttatgaaattattataattcagccttcaaactactactgatcaactaaaggaaagctaataaggtatttcttttaaacaagtattctggaaaagtaataactatggcacaaatgttcaggagtgtatataaaaatatgtgggctctcgatttatttgagcaaacattgcaatgagggtgttcattatgcttctaagtaagctttaactagaccactttcttcttatgtcagattgtgctggttctagctcataataatgaaaaaaatagaattatattttgtatgaattgtttctaacaaaccttgatctgtatatacttgtgaggggttgtttggttgcctaattgttgattggttggttagttgggcaaaatcatttattacatgcaaaaatagaaaattatttgttaaattcagagaaaatatgtgaagtttacaaaggaaccaaaatgataatgggagaatttagtcttaaaagtttaggttgtcagagtttatctgatatacaaaaaagtaggatcaaagtctaggaacaaacattggttatttcactgaaacagatttttaaagagcatattaagaaattaagaccattagatcatctctttcataatgatatgatgttatttccattgacggcaaatctatactgttccttggttttagagttgggtattctttcaaaagtgaatttaggcacatgcatgtacattgtatttataaagattatatatgtagtttccaaggaagaaacaaagacctatacagtttagactttatttgtttggtgaacgtgctgttgtgtttggcatagctagagaaatgtaaggtaaaaggctcactttgttttccagtgggtccagagtcttctctatacccaacatatgtttactttatgaacttaaatggaaattaatttattgtagactacatctctatttggaatgatgaggtaaatgtataccttagcattttctttaacaaaaatgttctgtgtgtcaggaaagaggtgtgagagtggtaggcagcctgccgcaaacacacggatggctccccccgccacgaaggttgagaacaaagccagggggcccagaggagcaatagccctgggccacaagcgtgggtaggcctttcacgtattccgtctgcacaggcaaccaaggccagtagaaagctatggctgcaaaaccctggggtggacgatgtttgatgattagacggtcatctctaactactaaactaatatctgcattcttgttaacataaatctctccttggctattttaatagccacagtcccaaacttcatcccagcttagatttctcagcactgaggtaaactctgcattgtcatcccagcgtacacctttaatgttttattgatttcactggcactgtatttggacctgtccttgtatatgtagagacatatgtggcttcattggtaatttacaagcaaaagatgacatgacgtgacacctgtatgaaaatgtgatgattgaactccctgtgtacagcgagtgaattaaaatgtctgcctctccagacatttcttaatgattccacttaatagactctatgtgtgctgaatgttcctgtgtacatatgtgtgttaaataaaacaattgtattgaagactgtttttctcacaatattaccttttccagtgttcactcatcttaaacatcctcagttgaaatccgtatgctccgctagccctgctgcttctaatcattcatttccctggagagctggcttgggaaaggcaacttattcccagaggacagtagagcagaagtgcagaggtaagctctccctccagaaactcactggcactctctgtggtttgggaaaggcgttgcatgcctgttgctttatctctactctacatgctcccaaatagactggtaatggcaccaaatcatatcttgtcagattggatggcatgggttggctgcctctcgggagctaggctgagatcatcaagttcattgcatttcacgctcagtttggagtcgaatttgaatccctcaggtaaagggtataattggttttcagaaaaatcaagaataataaaataggtccttactgctcatagagggttatgtgtaagtagtgaatgtacttcttgtctcttaattatttcagataagaacacaaaagcttgatttgagtcaatcatcgtgtaacagtataattttctgtaagaattcggtgaacattccaggagtggtctgaggcatcttgggccctattaaatgcccactgtgggccccaggaaatgttttaacatctcatgacttaaatgtattcttatagggaaaataggggcagtaacagttctatatgatcagcgatcacataaactgatcaaatgtggaaaggcgtgacgttaataggaaggtaaagccaagcagtgctgggtgaactttcacctttcaccccttcggctgactgacagagcccagtgttgaagaaaatcaatactttggagccaggagggaaatacttccaccctctaactagagaatgtgttttgacaaggccaagataatccaagctgcacaggagaaagagaaaagaagactcatttttaaagcctgacacttcaaggtgtttttgtgcaatggtttagagatcgtcaatacatacaaataccaaaggtcaaaaagaaaagccagaagaatttcaaaaattagatgttcagttctttttgctgtttaaaaaaaaaaaaaaaaggactacagagagttttgtgcttgtaattgtccttttaatgaactaagctcacaattgtgtgaccattgaggtgatcatccctctttaatcaaaacttacatttttgtagcagcagaacgatgaatattgaatgctcaaaaagcattcagacttcctgcttctgtacaccttttggctacagattgttttgttttgttttgttttgtttttttgagtggttacattgttttgtgctaacatctcagaatttggttttgcaattcatgttgattctgccataatggcattgtaaatcctggatcctccttcacattcagttcaatcctttgcatgagaaaagagttcttgtacctagaacttaattttttttctagtttcccaagtccctttaagcaaattacttatgaagatattctaattaatgtctctctgagtgagaggtttatgcacctctaggaagatggtaaacaattcattcttaccagcaagattagagccattcattctgtagacaaatacctccatcaagtggatatagattctttgctttcctactgataagaaaactaagaagccagtggtgcccatacctgccagacaagctcagaaggacaaaggagtcttaagtatctaaagtacatcatcaggcctgctgtaaacatgtgctaattaaagagtattaaaaatatagtgaaaatatagcttctatttatatacctgcttactcattaataaatcccgttctattctgaggtgatagatcaggctggaaatttttattttgttttgtttcaaaaagagaacgcagccagccaaacctcctcaatattctgagatttcccagagaaggccaggagtctagcactgctcgaattgtaggggtatgaagtaaatatgtgctgcatttgtgaaatccattgtattgcacctgtcaaatgctcagaagagtggcacacaggaagcactcaatagatgtaagctaatatttttaggagacaggagtcctaattgagcatggataaacaagatgacctgtgttctttggaaaacttggatttttgttttatgttttcatctctatgtggactccacaagtagatctgaacatcctatccaaaggagggctcctgtggttctgtttgtattccccagctgctttgccatattgctatgtgttaccaccccgcttctcaccaaaatttgtagacatgaagaaatgcctaaatacatgccaatggaggaaactggttggttgtggctgaagttatcactgattcctcaaaaagaaagatcaccgcattagatttaggactcacattagcatcaggggtgactttgagtttcttaatgagtttcttccaaatatgcatctatcgagattgaataagactctggacaaaagtattgtagagtggatttcatggaatcaccaaagcaaaggaaactgaatatgtaggttctgttgccaatatcttcttgttctgacttaacgtcaaaatgacttagtgctttagtcttcccaaatttgaaatgtattctctaaaacagcggccctcaacccctgatatcagactgtggcctgtgaggaaccaggctgcacagcaggaggtgagtggtggtgagccagcaaagtttcatctgtatttacagaggtccccatcacttgcattactgcctgagctcagcctcctgtcatatcagctgcggcattagattctcataagagcgtgaatcctattgtgaactgagcatgtgagggatctaggttgcactctccttgtgagaatctaatacctgatgatctgtcagtgtatcccatcacccccagagaggaccgtttagttgcaggaaaacaagctcagggctctcactgattctacattatggtgagttgtataattattttatatatatatatatatatatatatatatatatatatatatatacagtgtaataatagaaataatgtgcacaataaatataatgcatttgaatcatcccgaaaacatccccaaccaccagccttttttgcatgaaactggtccctcgtgcaaaaaaggttgggaaatgatgctctaaaacttgacccacccagcggcacttcaagttttagtgaaaatgtgtgaataaagatacggcaatgaaacattatttgtattcaaccagcaagcttgtattgaaccttagaatatgccaagcgtatgttctttattttattttcctcttgctgatgagctcacaatctcaccaagcaccataacactatggaataagtgctgagacccggggcaggtaaagagcaatgagaacacaggaagtgatcgattctgatgaggtggtattgttaggtttcccagagaggaaacatttgggctaggccttaaaaaataaataggaattaattaggaggatactggggatgttataatgtaggaatttatagaagtcaaagttttgtgtgatcggaatgagtataaactacttcagacctacaacctgaaggacattggtagatgctgccaacaatcaagaaagttcttcactttgcagccattattgcaataacagaaaaccagactcctttgtcaaaggacactcgaaatccataagtcaaaaaccctaataaaagatttttccggctttagtgttttccatgtttcattttctttatttaagaaaagcttttgttgttttaaaaataagttgtgtgttctcctactcctggattctactgtgtgactggcacagtgagttgaatgcctggcacagtgcactgcccaggtcctcccacccccacccaaatcccactgcagaaccgaagcattctaacagctgtgtgctgagtccttccgtaaagattgcttcccagccaaagagaactgtctcacccaaggtcatgcttcctttcctggggagcaaacacatcccatgatgggtcaggaaagaggtttaaagacccagccccggctgaggtgtggtggctcatgcctgtaatcccagcattttgcgagggtgaggcggggaggatcacttgaggtcaggagttcaagaccagcctggacaatgtggtgaaaccccatctgtattagaaatacaaaaattagatgggcgtgttggtgggcatctgtaatcccagctactcaggaggctgaggcaggagaatcacttgaacccaggaggtggaggttgcaacaagccgagattgtgccactgcactccagcccaggcaagagagtgagactctgggtgacagagactcagcaagtcgtaaggaaggtgctaaggatggtgagtctccgcctcaaaaaaaaaataaataaataaaaataaaagacccagccccaagctccatttcaaaaccacttggaaaggccatcccagctccagaactcccttgagcattgactgaaggcttcactgaactgcatcccagctcaacctctctgtctgcccaggcctgggcatttccttacagatgctgatcccgagaacactgctccataaacttcctatgtgcagacctctctcacacatagtctgcatcccaaagaacccaccaggagtgtcccaagaaaacagattcaaaaatggagtttgggagctgagccacccattgaaccatgaaaagaaggacccatcactggtcgtgggccctcatggacagcctctggcacgcttggctgcacaattgttaaaactttccttggtgatgcttgtatggcgtgctgatggagggcgatgtgctggagggtaccacgtggcaggaattgaaaagtaagggaaaggaaaaattataaagacgatggacttggatgactgttgtggagtgctctggaaaaaagacaatgaaaagctgaagggtgattaatcacccagtagaggctaaatgtgaaagcctctggctttctctcagagagagaaagtctctctgagactccttaacatctaaggagagcttcatctcctacagccaaacatgagcaggctcagcccatggagaagcacagctccagaggctgaactcacctctaaaaatcttctgccccagggtcagagccctgacagaggtgaacggggttctctgggttgatgcacttgaacaatcttgaacccccgattccagtgaaccctcctcgggcctgcctacatggccagctcctccctgttcaaagccggcgttcctctttctttgcttgaagataatgcagaggcttctcccatgcaaaactacacatgccccccactggagtgacttgggttaagtcatggtacaacctggctgccaaagtgctggacctgctaggacagggaaagaaccatctcccataggagctgtaggtcctcaccaacatgtacccaacatagccactgaaatgggactggatttagcaggtgctgggtcaaggggaaacggactataaagtgggtcaagggagagtttatcgataggagattgaacaacccgcaaggacccagggaaaaagtgctgccctgatgttataagctgcttggcttggagaaaatggtggctgacactaagaagaaatgtcagaactgatgtgacagagggtggaggcaagaacaggaaagctcagagtgaggagactgctggagcaggtatgctaggtacccccaaatccactggatgcctctgctctgcgagagaggctggggacattcattccagcaatgaattgaaggaaggtgctagaagggcacccacatccctgcaggccaggactgagggtagaagatgtcatgacagaactgggccccaggtatcaaggaggatgacaaggtcctgaaataatacagacctggtgggtgcaatcatcataattagtagcaagtttggagtggcggccagagagaccagacctgcagagatctttggatctaataaaacatgtcatccctaagtgcaagatgggagggcagccaacaagggtattgttcatctatacaggcaaaagaaatcgaaaatggatcacaggaggctgaaagcagccattccagtaagaagtcaaaatcccttgcctggtttgtaaacccaaatggcatggttagcaggagctcagaccccttgtggatgagactctgggtttgcccagtagtaagcaatggaaagtagcagagattcttgccaagggggaggagagtttagaatgagtagtagagaagggaagcaatagatatcagtggtggctttgggagcagctgcgacagcaggggttgtagtttgttccactaatatttctgttatgtttcccccagaatcctggaatggctgttcccaggcttttttcaaagcaagtggatctgagcggggcaaagggtgaaggcaggggacactgtggtatgcattcactcccccaggtactgggttgtcggcagctgatatttcccaactgagacctgctacaggaattgcttgaggctaaagagagccactctcctcaaggccacatcctcctccctaatgagagctacacccaataacccatcatggggataaaaggactcaaccctctttgcttcagtttggaacatctctgaagggccattccagcttcatagctcccagcgcatttgtcagagaactctgttgcaaccacatcacagtccagctcccccctgcctatgtattgcttccttcacacagatgttgatcccaggaacacttcctaatacacccgctttcagcaaatctgtctcagagtctccttcccagatgaacccacctaggttcaagtatggctctgccacttattagccagataactccctttgtataccactcacatctccatgtccctggtgtccttgcctggaaaatgggagtgatgatcatgcctgcctcatagtcttcttgtaagaatgaaaagagaaaagagttaatatatgcagcgcacttagatcattgtaaacattcagtgaatgccactatcctaactcttcttgtcttcttaaattatgagatttttcaggtcttaatttcctgcttctgtgttacaggaaaataagctttaccatgaactcttttcctgtttttttttttttctttcttcaaccaaatccaaatgctcagttttaaaaagtaaagaggaaagctggaagggaactaatatttctgaggacttattgtgcaccaggtaccatagtaggtgcattcattatttttcttaattcttcattctgaaagccaagaattagctcccttttagaaatgaaaataactgcaggtcacatagacaaatgaccaagattgcaccaaaaataaaagggaaatctaatatttttgagtcccagactctgttgccaaggcccagtttcctctgtgtttccagtggccctcgtggaacaggagatgaggagggaatcgccagggactatccggccacagtctttagaagcaggaggaagtgtggggagaatagaagaggtttttggttcatgtaagcccctgtgttttccctttggatgtatggccattgtgccaaattttacaagtactggaactatgttgattctcatttgtgaatagcaggactattcacaaattagtgattttacaactcagcaaccagttttttgtttgtttgtttgtttgttttcttgtagacaatggatactttctttgggaaagtggaagttgattgacagcaattggccctggttttcattgattacgcagtagcatttagtgctgctggccagtccctggcactgcccgctctccttgccttcatggggccacaactttctgacttctcccgtttgcttttgcagacacctcctcttcctctagatattcttctccagagaggcaatctttaataacttgagagtcactgatacatataaaacagacttccgaaacttaagattaaaaaaatggtttgcctcccaggtgacttgaacagagaagtattacaagacatactctctccacttggccagaatcagcaaagagcatcccctgacaggacaggggctgttccagtctctattgtcacatatcgggtttacatagtcttggctccccatccctgatgatctcgttctgggaaatattggaatatatcagaacctactagagcaaaccataatatgccaccatactcacatccattagcctcagctttggccctgcagcaggctccaggctgtgacacacatctcaggtctcttttctaacaagtgaagggattgaggatccagatgtgcttggagcccatgtgaggcatttgacatatgtaatttcacttaagtctctcaataattctgaattagcccacattgtataggttagaaaactgatacactgacaggttaagtaactggcctaaggtcacacagctagtaaagtggtagagttgggattaaaatccaaagtgctctttcctctccatcaatggacgctatcatcaaggccagctttatagtagcgaaagagacatgctttattctcatattgacctcaataaaaaaccaaggacctcaaaattcaatcttcatttatttattccacagtgacttattgaatgcctattattttccaggcatttctagcaacggtgaaattaatacagtgcaggcactcacatcctttatgcatctcaaaggctatctagctaatgcgctggatgttgtgaggcccattatccatagtgtacacacgcccgcagcccctccttctgatggtttaacttggagcaatcctcaatggttgtgcatagccagatacacgcactatgcacacaggcactgggttctgggtcacctccctggcatcccaggcctctgtctgcttccttcagtgcttccttcttcagccgtccctccctggatcccagccacctgagctccatccatccctgatttcattccttttttttcctcttccagctctagtccacagccttcctccccaggacatgtgattcaagcctgaagcatacaatgggagcacaaaggaggaggggacagagaaaagaaatgagcatcagccttgggaatgtctcctctgactgtagagtcaggagacattaagataaacattcactggaacatatacattctggtagattccgatgagaattaagcccattcattcatctggtaaatatctagtgaacatctaccatgcatcaggcagagaactaggtgctgggattgtagtggggaaggcaacagttgtgacacctgcccttatgggctcacagtctagtgggctggggtggggactaagccagccacaaattgtaacatgagcagtgacggaaacaagggcagctgagacccaatagcccagggaaggagtgggcaaggtcaacccggggtctctgaaggaagataaggagctggatgttggtggagcagttggaagcgggaagagcttctagagaagaaaatagcacgtgtgaggtccctgaggcagaagggagagtgacagcaggtaatgagccaggtgtggccacaagtgaggcatctggacagtattgaatcctgtagacaatggtcaagggcactcttaggggactcaaaaaccatccaaaaattgtgagttgaaaggtgtgatttaatttagctagaaaacaccactcagctgcaatgtggagaatgggttggagtgggttgggggaaacggggtttgttaattatctatacagtaacaatattagcacaaacttcttaaaacacatttgcccgggtgcagtggctcatgcttgtaatcccagcaccttgagaggctgaggcaggcagatcacttgaggtcaggagttcaagactagcctggccaatatggtgagaccccatctctactaaaaatacaaaaattagctgagtgtggtggtacacacccataatcctacctacttgggaggctgaggcaggagaatcacttgaacctgggaggcggaggttgcagtgaacgaagatggcaccactgcactccagcctaggcgacagagtgagactctgtctcaaaacacacacacacacacgtacacacacacacgcacacacacacttgcatgcacacatgcgcatgcacacacgcgcatgcacacacacacatatttatggcattacagcttctcggaaccaggcatccagcctaggcttagccaggagccttggcctcaagatctctcacaggctgcaatcaaggtgctggctgggtctatggtcccatctgaggcttgtgagggagagaatttgcttcaaagttcatgtcattgttggcagaattcaatttcttctgcttgtaggactgggggcctcactttctcgctggctgtcactggaggcccttgcaggctgttggctggagcctagaggcttcctgcagctctctgccacttggagtttcccaacacagtcacactgcagcggtggtggcattatggctgaatcttgaaagatgaataggagtttcccagggtggaagaacattcagacaaaggggagacgtgactgaaggcatggaactgtgaaggcaggtgatgttttcagggagcagcagatgtagccagtcccttacccagagccatgttcccctttattccatgcttctaagcctgggcttggctctgttctttgcaccaatgaccatgtgctcaggctggagtttatcagccttggaaatggaagcttgattaattcaagccagcaagctcatgcagtgcctagtggtataagtaaggccttcagtgccattctggcccatgaggtgggaggggggtgctcttgggaaaggttttcctccccagtgaaaagagacattcacgtagaagtttctatctgtggacatagctgtgtgaatctgtgatacctgggaacccacaagccattttgggcctatgttggaacccaccttggctcaagccaacttactggggtaaatcctcagtgacatcactgggcttctagaggagccagccctgcagacacccacctctttctcctgtcatatgatataatcatcttccccactggctgagccccttgcagccaacccttgaaaacagactgtacagtgtacagtgacatggcatgaagtgattcaaactcatgagctgaagccagcatgaagatctttgtagccagtgacacggagctaggctgtttcctgagaggtctggagagttctcaatgattttcagggcaacaatgatcccatatcttggctaaacctggtggcaggatgcatcatagtttagaaaatggagatcgttgtgacagggaggccagggatggctgcacatctagagattctgagaactcaaactattgcaggtgtgatggacaccaaaaggaagggccaagggacatgtaagaggcaggagttagaggagttggtgagtgaaatgtcaggaaggaggcagaagcccagggttccccagtgcgagagatgggggaccaatggcatttgccagtccagaatactcacattcttggaaaacatcatccatgttcacaccttgattccttcactgctactgttcccttcgcaggtaggatccttccacagaaaattcccattcacataatcccacattatagcattgctgccgtggggaagtcagattccatttacactattcagacttgcagtccctcagtcaggaacaccagctccaggagtgagacgcacctctacgaactgtatttacgttaaccctcagaacaccatcccacatgacaagccacagggtgagtagaaggctgaattacttcaaatgtattggttaataacttagtcaaaaaatacaaagctgcagtgtctgtcacattggatctatttcttgaagacaaaggctaagcttcattgccggctcagaaatgcactggaaacaattcttgttgtttcacttcctggggcttatatttcttgctgtttgtaaaatatggtattagataacaaagaagagtctgggtagaaaagggtagagtctacattcctcatgttgaaaacctgcttagggtgattttccccttactgaactcctaaaattaccaaaaaaaaatgtattcaattattatattttgaatttcatcaagaaaaaatgtgtggaaatttgttttctctctgtgcaatattctcaattttgcctcttagcccacaaagcctaaaatatttactatctggcccttcagcagacaaggtggctgtcttagtccattttggctgctatagcaaactgccataagctgggtggcttataaacaacagaactttattccttacagttgtggaagctggggagtccaagatcaaggcatgggcaggttcagtgtctggtgagggcccagttcctggtcacagaatgcatcttcctgctgtggcctcacatggtggaaggggtgagggagctctctggggcctcttttatgagggcactaatctcatttactagggctctgccctcatggcctaatcaactcccaatgttcccatctcccaatactgttgctttggtgattaggttttaatgtatgtattttgaggggacacaaactttcagtccacactggtgactgactcctgagctacagccataccattcaaagtgtggtctggcacttctcaaaaaaagacatttctgtggccaacaaacacatgaaaaaaagttcatgatcacttagagaaatgaaaatcaaaaccacaatgagataccatctcatgccagttagaatggcgatcattaaaaagtcacgaaacaacagatgctggagaggatgtggagaaataggaacacttttacactgttggtgggactgtaaactagttcaaccattgtggaaggcagtgtggtgattcctcaaagatctagaaccagaaataccatttgacccagcaatcccattactgggtatatacccaaaggattataaatcattctaccataaagacacatgcacatgtatgtttattgcagcatggttcacaatagcaaagacttggaaccaacccaaatgtccagcaatgatagactggataaagaaaatgtggcacatatacaccatggaatactatgcagacataaaaaaggatgagttcatgtcctttgcaggaacagggatgaagttggaaaccatcattctcagcaaactaacacaggaacagaaaaacaaacaccacatgttctcactcataagtgggagttgaacaatgagaacacatggacacagggaggggaacatcacaccccagggcctgtcgggggtggagggcaaggggagggatagcattaggagaaatacttaatgtagatgacgggctgatgggtgcagcaaaccaccatggcacaggtattcctatacctatgtaacaaacctgcacgttctgtacatgtatcccagaacttaaggtataattaaaacaaaaacaaaaacaaaaactaaaaagcaaagtgtggtctgggcaccagccgcatccatatcccctgggagctatttagaaatgtaaaaccttaggtcacacccagacctcctgggtcacaactgcattttggcaagcttcctggatgattcgtgtgcacctacagtttaagaaacacttcacaggagtccatgtggaacctcacaggtgctgttgatagtttcattaggcaccaggctgggactggctctgggcaccaccattcactgtgtcccaaggtggaagcccaggcctcttgcacaggggtgcactaaggtatgctgctccccatcaaaagattggcccaagcccagatcctaaagccaatctctctggggcatctgttttcccatctgtatgacggaggggttggaaaggctgatgtcagaagaccagtatggctttatcatgtgtttggtttttgtttgagggggattgataggatgatttctgtccatgttcatgttcatgttccagaaacatggtaggttgagatgaaaagggcatgacaagaaccacagcagcttccagatgaggctagtgtatggagatgtgagattcgggatgtttcattttacatagatcatattctgtaaggttattcttctagttctatgtttctttgcatcataggaaaaaggaatcggatccagggaaaacgctgtaccactggggcccgggtgccttaagtggttttctgatcaactccatagaatcagaatgtcaggactacaagtcatccgtgtccctgcaaaggacatctcatcttcattgatcatccatggtgctgagcatttaagaggcaccagggatgtaactttgaatcagaagagacctggttcctgcccttgtggagcttacattcccgtgggtgagacagataaagagcagtagttataagcaaaagggggaaaggaagatgcgggggtagggagtggtttgcaagaggagtcaggtcacacagggttggtgtgggatggggcattaacaggaagagaacactatgagatttgtgtttcgaagaaaccattggctgatgtgcgagattggagaggagtaagagaaggcatgaggagaccaattaggagactactacagcttccccagagggagatgacgaagggagggcaactgcttccattgcagggagcgagacccagccccaaagaaagcaaccaaggatgaaactgagaactggggtagaaggtactgacaccaaagtcccaaccaaaatagttaaaaccggtcatccctggcaatagtactgcagccaatggagacactgttactgaaggactgtgtggccttgggcaggttactccacctcgctgggccttctgttctttccttgaaaatcagaggttcaaccagataattactgtatgtggtgaccagatagtttcttgtcctaactgggacacttttgagggcgaaagatggaacaattaataattaccccaggacaacagacataaacctagccaatcctgggaaaactgggatgaaaatccctgacaatcagagctcagaacccaaatgagctccctccaagttcaacactctgtttctcaacaattcttttatagattgggagctgaagtcaactcatttgtaaccagaattaaatagattcaaagttcctgctgaactgaactcctggctaagaaccctgcaagcatcctttctactccccagtgcattgaaaaccctatttgtggtgaaaagaggccctgttttagcctcgagaagggtggaattgctggtgaatgcaaggactggcaagggggtcagcctatctctgatatggatgatgctgtgcatgcacctgtggggtcatgggtggagggaaggcagatggaatcagaatgcccccagagcgggactgttgactatgtcctggttagacccaagtctctcaaaaagtcatcttcttcttttatgaagacatgtagcatagccagttcattctagttggaaaggcaactaggatttggaaataggaaattcagattcaagtctcaggtctgcatgctacttccctgctggtgacctggacaaatcactttccttacttaatctcccattttctcagtaaatatagataatgccaccctcttgagacgttgtaattaggataaaatcaaatcagtaatatgaaagtgttcagataatagagaaagtttttaaataaactctttactttgaaataatttcagacttacaaacaagttgaagaaagagttcccatgtgcccttactcagcatcccaaacggtaacatgtgacataatcatagttcaagaatcaaaactggtgaattaacattgaccaatactgttaaactaagctacagaccttaaatgttaccaaatgtgtcagcaaatgttcgttttctggtccaggatccaatccaagaccccacagtttctttgattctgataccaattgagactcttctcatctctgacaggtcctcagtcttcctttgtctttcatgaccttgacacttttgaagagtacaggttagttattttgcagacagtcccaattcaggattgcctgatgtttcttcatgattagattcagattgtgcttttttttttgccaggagaccacagcagtgacattgtgtccttctcagtgcagtgtatcaagaggaacatgatggtcattcctggcaatgtccacttttatcacatgattaaggtagtatctgtcagttttctcaactataaaatatgtaaactatgatttttttcctttataattaatatgtgtcttatgaggaaatgctttgagattatgcagagacactgttccccatcatacatttttgcagtaattttggcagccattgatgattcctgccagtaataatcatagtggtggttgttatgcaaatggtgaagccgttttaattattgcttttcttacttttaaggtctggggcagggatggcaagttccaaccacttggtggtggccttctggaactctatgtgagaacgattgtgaggtcaagttctcttaacaggggaaggattgtgaggtcaagttttcacaacctggtgaggggaggtgggaagggagcagacaggtgccatattggcaattctaggatggtcccttcccctttggagagatagatcttgcctgttgggccttcaggccaacacacactagcctcgctagaaggaatactgcctgtgtacctccttctttcctcctttgggcctactttgttcttctgaatggctgaaactccaaggcaccatggtctgcacagatggtaactatggtgccaggtgttccacaaggaagggcagcttgtgctaggctctggattagcagggctggggctacattcacttcctccccaagaggccctatctttctataccagtatgtagtttctctgatgagatcagcatggaagccagttgcttggtgtggtccaggaaggcttctgagaggaggctgctgctggaccttgaaggttggggagaagatcactgatgggatttgggagcatgcagaacagcgttattgcttcaccctggcatgccctttccttcatggactggattctccttttatctggattcccccattatatttcctattgcagccataataagtttctccaacttaatgccttagaacaacacaaatttattattttacagttctggaggtgggaagtccaaaatcatcgtcactgggttaggtctcaatgtcggcagggctggctgaggctctcgggaggattatctttccttgcctttttccagcttctagaagccaccttcaacacctaccatcagatctaaattccagacagcaagaagatgtgaaaacgctctttccttcctttaaaggcaaaactcaagacacacatcaaaacatcaaaactcaaggcacacatccaaactcatggcacacattaagtctgctcacatcttgatagtcacatggctacactcagctgcaagaaaccctgggaagtatagtctttggcttggccacttgtctagctcaaaaattactacagaggaataaggggagacagatagtggtctcctcttcttcaagagaggtaagagggcacaatgctgccttttgtctgatgtgatggttaagaaggaacagaccaatgtgaggtgtgagttatgtgctgtgacttggactcattcaacagcaagacccaaggtttactctgatgggacagatgggcagaatcagtgaccacatcccctgtcatgaacctgctgcagccagtgtgatacctgtccagcacagagattggcccaggggaaagagcgtgggctttagagccagattaaattgggcttgtatttgggttctccacttgatagatgtgtgaacctctttgggtctcagtttctgaataaataaagtggaaatgacaaaactgaccttgggcttttgggcatattcaatgaaacaatgtaaacaatctagcctggaacctggcacacagtaggtgctcaaacaatgtagctagctgtagtgtccacccacacatctacacaattggcagcactatctcaaatcttatagacaaacacatgcgattcctcctcatattgcaaggtcccttcagagcagaaggcctttgagaaatggtagaatgatttgttgctatctgttaccctgctataattttcgtgtttggaaattcattaagaattcatttcgatgaatcccaaatgcatgcaccatgaaaaacaattagcattaatagtgtaaaagaaggagatcaataaatagattcatttttaaactgtaataatttatttgcttcctaacttttgggaaatactgcatcttctggtgacacgtcaaccattaaatagccgaacagcgatgatttgtggaaggacgttgataaccagtaggcagaccctgctctcgagtgcacaaccccagcaaccagtcagcaacagtggacagaaagggaagcagcccttttcaggagacaatgcaactcaacaaagtgcttatcaggccttcctcatccttaagcactgtccgaatgcaacacagcagatgggaaaagtaacgagaccactgaaccaaagatggggagaagaaaggtggcattcctcagacagtgaacagggagaggagaaagaggtttcaagatgagctgcaaggctctgagattcacttcacatggctccctgcctatgctgatgcaggaaggcccgggaaagaatgtctggatgaagaagcagcaggtgattcccgactgaggagggaggaaaaagccaaatgaaatgagggagctgtagtcaaggaggggaggaagccgaggacggcaaggcctctcaatcatcgcttaccagggacagagggatggctgccattatcccttctcaccacgacaaatgaaagacgatgatacctaagaaactgccgcagccacacagagcggcaggaggcgagggtttgcctggtgaaagccaaacggcagccctgctcttttgcagcctcctatgggacatcatggcgagcagtgacggatggagaaaatgcagcatccctgccgggcaggacagcagcctcaggccagggctctggaggatggacaggcagaccccacggcccaggatccaggaaggccctctgccaggctgtggctccaggaaggccctctgccaggctgtggctgagagtggcctggcctggggcatggctgcagatgccgccccacccgccagccgcagggctgggggccggcacagattacattttaaggtgatagtcatctttgacctttgggacctccagggccactggtcatccatcttagagccgctgaccagcaacctctgggctatttttatggccggcaaacattgcccattgattgaattgattgaaatctgcatctggttcttggggaaaggacactggcctcacagccgcaatatgcagcttcgttttctgttgttgtctttgactctttcctttccatttgtcttcccacccccagcatgaaatgagtttggagacagggcgcacacaccaagacacacacggcctgaatacacacacacactaaacacacacgtcccgcattcttttccagcagatttcttactgtggcgctcatttttctgtcagaatttcaagggttcctcaaaggaattc

SEQ ID NO: 22659 - DNA, 183797 bp, Homo Sapiens
gaattccagctcactctgtgggatttctgggtctgatagaaacatggcattattattattattattattattattattattattattttgagatggagttttgctcttgttacccaggctgaagtgcagtagcatgatctcggctcactgcaacttctgcctcccgcgttcaagagatcctcctgcctcagcctcccaagtagctgggattaccggcacatgccaccacgccttgctaaattttgtatttttggtagaggtgaggtttcaccatgttgaccaggctggtcttgaactcctcacctcaggtgatccgcctgcctcggcctcccaaagggctgggattacaggcatgagccactgtgcccagcctgcagcagctaaattttacagtgtctcttttctccttctggaaactatatggaacaacaacaagactgaggaggaggagaaggaggaggaggaggaaaaagcccatcatcaacacacacatcaaactcaacttcagagaaattaggaagctgggaagccatgtaaaccaaaagcaggagacaccagcagaaccaacgcaggaagccagggaagtgcagaagaacagggcagggggcaacccaggggggaatcttcactgttgccagcaacacacactcccagcaggagaggaccctcagagtgagaacgcagagctggagaagtgaagaaggagcaggtggtgcccggggaagtccaggggtgtgggatctgagagcaccccttcccaagagaggaaggaacacttgggaaggcagggctgagtccctggaggctgtatccgggaaaggaggatggcagtagaatcttcctgaagccgagtgggttctgagaggcagaggggcagtggtacagaggtgaggctgacacttctgtgcaggaagggcaggctcctgaggaagggagccccgaatgctctccactagattcccagggagccccactccctccacagggacctcgcgctgacatctgggaaatgccattcatactggaacctccgacacactgccatgaatgtgagggtttcgtgactgatggggtaggtttctctcttccaacttaatagtataatttccatttattcctcccccagcctccctgaacattcacctcttagatagccacagtacggtgatcagaaccaggaagtccacattctcatatttaactatattaaaattatttcacaaaataaccaattttattaatttaattaaatacatttaaataatgtttaaatatatttaaataatgtttaaatatatttaaataatgtttaaatatatttaaataatttaactaatttaaaatgaacatattcgctaaacaaaagaccttattggagtttcaccactttttccactaatgtcctttttctgttcccaaattccacccaggatcacgctgcatttagttatttcttagtctctcgccattttgtaggactgcaataacagttcctcaatctttccttatctttcataaccgtgacatcttgaaccagtactgatcactatttgtcaaatgttcctcgatttgggtttgtctgatgtatttccatgattggactgaagttacacacttttggcaattacagcacaaaaatgatgtggaatccttcccagtgcattccatcagagttatggcattgatagttcttcttactgatgatgttgaacttgttcatttggttcaggtttctgctgggtttctccattgtaaagttactatctttccccctcatagggggaaagatcttaggagaaatacttggagactatgaaaattttgtattttctcaaactttaaaatttttttcaggccaggcgcagtggctcacgcctgtaatcctagcactttgggaagccgaggcgggtggatcacctgaggtcaggagttgaaaaccagcttgatcaacatggagaaaccccatacgtactaaaaatacaaaattagccaggcatggtggtgcatgcctgtaatcccagctactcaggaggctgaggaaagagaatcacttgaacctgggaggagaggctgcagtgagctgagatcgtgccattgcgctccagcctggataagaagagcaaaagtccatcacaaaaaaaaaaaaaaaaaaaaaaggccaggcgcaatggctcatacctgtaatcccagcactttgggaggccaaggtgggtggatcacctgaggtcaggagttggagaccagcctgaccaacatggagaaaccccatctatactaaaataaaatacaaaattagctgggcatggtggtgcatgcctgtaatcccagctactcgggaggctgaggcagtagaattgcttgaacacgggaggtggaggttgccgtgagccgagatcctgccattgcactccagcctggccaacaaaagcaaacctccatctcaaaaaaaaaaaaaaaacaaaaaaacaaaacacctatttgacagccgggcatggtggctcacacctgtaatcccagcactttgggaggccaaggcaggtggatcacctgaagtcaggagttcaagaccagcctggcgaacatggtgaaaccccgtctctactaaacttacaaaaattagttgggcatggtggcatgtgcctgtaagttccagctacttgagaggctgaggcaggagaatcgcttgaacccagaaggcagaggttgcagtgagccgagacggtgccattgcactccagcctgggcagcagagtgagggatctcaaaaaattataataaaaaaataataattctattttgaattgtggtaaaatatgcataaaatttactaccttaaccacttctaagtggcagtcggaacaggggttaaggagagcccttgggttgggtaatgtagagtatattcacattgccatgcaaccaatctccagaactttttcatctgacaaaaccaaaactctatatccactaagcaacttcccattttctcccttccccatgtccctggcaacccccgttctactttctgtttctattagtttgcttactcagtctggatgcttcacataagtgaaagaacacagtatttgtctttttctaactggcttatttcacttagcataatgtcctcaatgttcatccatgttgtagcatgtgttagaatttccttcctttttaaggctgaagaatattttattgtatgtatataccacattttatcaattcatctgcctatggacaattaggctgcatccatcttttgatgagtgtgaataccactgctataaatatcagtgtacaaatatttctatgagaccttgctttcaattattttggctatatacccagaagtgatattgctggatcatttggtaattctatttttaattttttgagaaactgcctgtcctgtgctgagcaggtctatataaacctacccgcaaaggccaaggaacctgagataccaaagaaagaggctgacaaatccagtttctcagaaagaaacatttaataggcgtttatgaacagaagccaagtcagggatggcaccaagataagatggtggatccctgtgccattacccccacccccccgacccagggcttctatagcataggggaagggtaatgcgggcttcggcagggatgtgtatggccagacacggtggctcacgcctgtaatcccagctctttgggaggccaaggtgggcggatcacctgaggtcaggagttccagaccagcctggccaacatggtaaaacctcatctgtactaaaaatacaaaaattagccaggcatggtggcaggcgcctgtaatcccagttactcgggaagctgaggcaggagaatcgcttgaacccaggaggtgaagtttgcagtgagctgagattgtgccactgcagtccaacctgggagacagagtgagactgtctcaaaaaataaaaaataaaaaataatatttttaaaaagataaaatagaaattgtagatgaattcttggaactgggattaatcagaatatggcagattagcctccaagatggaattgctttactctcattcaaggtttccctcattcttcactctccccatgctggtcaccttgctgtttgttcctcaaacacatatgaaatgcgtttctgtcttggcagtcatcctgctacctgtaatgtcagcactgctttctgttgtcccttcagtcaggtcattgttcaaatagctctctagacaggctcttccttatcattctacttaaaatagcccccaatcactctgtgtccctttagcctgcttcctcttcctgctatttcatactacctgaaaaaatacttgaacttcctagaacataagctcctaaaagcaagaactgggctccacctctcctctcctctaccccagcactcagaagagcaacagagtcagcatccagtgagtgttcatgaatcaagtcactgcttggcagaattcagcactgggaccacagcctcgcctgtcttcaactctttctccttctgcttttcctcctcccactctagtagccactcttctgggggcttgtcccttaaatgattagtccttaccaacctattttctgtccactttatctgtttttgagagagggtctcactctgttgcccaggctggagtgcagtggcatgtatatgggtcactgcagcctccacctcctgggctcaagtgatcttcctgcctcagcctgccatgccatgtaactggggccacaggcatgtgccaccatgtccagctaatttcttgattttttttttttttttttggtagaaatgggtctcactggcctgcagaaatatgcatgtcctcagtgtttggactgccagctgcaaggcagagccaaacccaatatggccccatcatccctggctcagctgtgctacctggccatgctggaaggggtttgattttccaggaatttgcttcacagctctttcctgtcccaagatctatgcctgatgtgtaaattcaggacgcaaaagggcacaaaaaagcaataactactaaatataaggaaaacaactctgtatacagcacatataaagaaaagcaagatatatttggggagataaaagttgtaaaggcattaagatgtgtgtttgttgagaaaaaataaatttgtgcatttaagaagttaaaaaaaaaaaaaaaagaaatgggtctcactttattgcccagtctggtcttgaactcctacactcgagcagtcctctcaacttggcctcccaaagtgctgggattacaggcatgagatactgtacctggtcttatttttttcttttcttaagatacagggtctcaacatctggcccaggctggactcaaactgctgagctcaagtaattcccccacctcagcctccgaagtagctaggactaaaggcatgaaaccaccatgcttggcttgtccaatttcattctacacactttctcggtatttaaacagctgctgttgctcttcattctgtagctctacatcagattcatgctccagtcctgtatatccaaatgatgactagaggctgccggctctgctctttcaaaggcacaatgagtgtagccggtctacaaaactctcccttttccaatccagctttccctcctgcatcacctatctctctacatctggaaccatcggcagctgccttcataaggcacctcggtctggcattcggaaaaccaccctgtcttgccagagccgcttggtcttgggtagcaaaagctgtatgcaatctaaatcaagctttcaatcatgagaaatcacattccttcttttccctttgtaatatactcgtgtgttttttttttcctttctcaataagcaaattgtaccaccatcttattctgagatgctcctttttaaaagctgtagatcacattaatggaagtgtttactgctgggaatattttccatgtgcaatgatctgtaaccctctttttcttttcttttttttttttgagacagagtctcgctctgttgcccaggctggagtgcagtggcacagtctctgctcactgcaagctttgcctcctgagttcatgccattctcctgcctcagcctcccaagtagctgggactacaggtgcccgccaccatgcccagctaattttttttttttttttgagatggagtctcgcttggttgcccaggctggagtgcagtggtgcaatctcagctcattgcaagctccgcctcctgggttcacaccattctcctgcctcagcctcccgagtagctgggactacaggtgcctgccaccacacctggctaatttttttttttttttttgtatttttagtagagacggggtttcaccatgttagccaggatggtcttgatctcctgacctcgtgatccgcctgcctcggcctcccaaagtgctgggattacaggtgtgagccaccacgcccggccatgcccagctaattttttgtattttttagtagagatggggtttcatgatgttagccaggatggtctcaatctcctgacctggtgatcagtccgcctaagcctcccaaagtgctaggattacaggtgtgagccactgcgcccagccgaactgtaaccctcttatctcaactagctgacattattacttcacatccagttcaatttataaattaagagaggtgccatgggccgggtacggtggctcacgcccgtaatcccaacactttgggaggccgaggcaggtggatcacgaggtcaggagttcgagaccatcctggctaacatggtgaaaccacgtctctactaaaaatacaaaaaattagccaggtgtggtggcaggcacctgtagtcccagctacctgagaggctgaggcaggagaatggtgtgaatccgggaggcagagcttgcagtgagcagatatcatgccactgcactccagctggggcaacagagcaaaacatcgtccaaaaaaaaaataaaaataaaaatgaaaaagaggtgccatgtgtacaaaaatcaatgcatatttatgaacttttttttcaaatatattttcacacattttatctaaatacataatacagaagcctgtgtgacttgggcaatgtggccaggagggcctgagactaacacatccaccttggcaaaaggacataaaatatgtcttatggtcagaaaaatcaacattttgtgtatttacttagtttatgaaaagtactgaaaatgctattactagctgaatttgtgatttccttttgaaattctgagttatccttatttttcccattttgtttttgcaccaaggagactgcagtcaaataaaacagatactacacgcactcgtcggggcagccgtactgcagaagcacgttgatgcactcctggctggaggcctgccgggcgtaggtcagcgctgtgttcccgtgggcatctcgggccatgacgtccaccccgtaccagatcaggagctgtgccaggaccacattccccttgcggcaggccagatggagcgccgtgcagccgtctccctccccacaggtctcgttcacctcctcacgggagccatgtgccagcagcaggatggctgtctgcaggtcctcatcagcggtggcccgcagcaggtgctggcccagggacagctcagtgcagggtagtggggccagaaagagcttctcctcatatttggaacggatccaccgttccttctcttccctcgtggactttactgagggttttgtctgcccctggctgctcccttcccagatgctgttggctaggtcattgccaatagatgacataaccttcctgagctcaactggccagtcatccagctccagagatcgcacacgggaaaggcgggtgccaagactgcggtggattcctgagcattcaatacacatgaggactcccaagttcaaactggcccacttaggattctgggtctcatagtccacacagtgggcgttcccacgcatgttttggatcgactgcagggccatggcctcgctctggctggtcagctgggacttgcttttactgctctcgcatgactgcaggctggccaggatctggctctggatggcttggacccaggcatcccgctcctcatacgtcgtggcttcaaagtgccatgtttggccagtggcagacacaatcataaagttgttggtgcttttcttctttaggtgtttctttttattggcatgaggagaggggggcgggttgagcttggggctggtggtgctggagatactggggctgaagcatatggagtcacccagcccggtgtccatgtccttggataggccattgcttttagagctggagatgggtgcacaggccgatgtggctagggatggccactttcctgggactttgatggtagatgtccgaaggtcaatctcttttttatgaatattcttcatataatcacctaagcttgaataataggtgagcacgccattggaacacagggtgacgtatttctttttccatgtcttcagccatttcccacttcgctttaagagcatgccctgtttaatggggatggctctgccgctcccgatggtgtcagcatgattctccggggctttcctctctttgtctgggtgactccctttctcagatgtaaacaggttggaccagcgcatggaccgcttgcaaacgggggtgggtgtgttggcagtgggaggaacactgaactgagggtcctcctggctggtgctgggagtcgatggaatggaggaggaatagttatttaaactcccacctccatttctgttcttcgtaatgtgcacggtggaaacctgtgtggaacagaaggaggaatggcttcaaaaattgggtagtggcttgcagggtcctatagacagcttacaattaccttttaaaaagatacattttctgggccaggcatggtggctcacacctgtaatcacagcactttgggaggccaaggtgggtggatcacgaggtcaggagttcaagaccatcctggccaacatggtgaaaccctgtctttacaaaaaaaaaaaaaaaaagaaaagaaaaaagaaaaaaaaattagctgggcatggtgtcacatgcctgtaattccagttactcgggaggctgaggcaggagaattgcttgaacagggacctgggaggcagagcctgcagtgagccaagatcgcgcgattgcactccagcctgggctacagaaagagagtccatcaaaaaaaaaaaaagatacattttctgttgtttggatagtatatttactcatactagctcactaactaaacagagctgcagatcagttcttactccagcacattctttttacaacacttaagatgactaaatgcaacatgaaatggggaagatttaaaaaaagatggctttgacttcagcatgaaacagatacaagtgtacgatgaaaatagaacctcaataaaagtgccacttaccgcaaatgagtgtaactgttcatcaggtatgctcaaagatctatctgcatctctataaaataagaaagtgcattacttcaaaaactgttaatatcttagtataatatttgttgagtaaaatacttcctcctgtgtgctttggtgtttactttaccaaagcagtttttacaaattcttctcctggatcctgacttgcagagggtttcctgacttcttctttctcagcacatcatggcctgtaccgtgaagccttttatatgataaccagtcagaaatgcccatgaatattgactctccctaacaggccatggcaataaaccaaacatattttcactcttctaaccacacattgaaacacaagaatgttctacaaagcagtagtagtaaactttaataaatgtaaatgtgattcagatttcctagcttcctttctctttagttctctgtagtatactctcatgatgtttttatgtattttctgttgtctgaatgacaaactcatctgcctttttaagaggccagtctttgaggaactttaaactttgtaaaactaatgcattgtgcctgtgtataaaccagtggttctccaaatgtgctctgtggacctctcgggatcccgaagaccccttccagaaggcctaagaggtcataactgttcttttttttttttttttttttttttttgagaccaagttttactcttgttgcccaggctggagtgcaatggtgtgatctcggctcatggcaaccttcgcctcccaggttcaagtgattctcctaccccagcctcccaagtagcagggattacaggcacctgccaccactcctggctaagttttgtatttttagtagagatgtggtttcaccatgttggccaggctggtcttgaactcctaacctcaggcgatccacttgcctcggcctccaaagtgctgggattacaggcctgagctactgtgcctggccaacactgttctgaatcatactaattaaacctgagaaagctgatgaaaaattttaaaaatttgtgaaagtaatacaaagtcattgcctgctttttcgttgacacttgccatgattgtataaaagcaaaagtaggtacaatggctggtttctcagcataaatcaaggcagtggtaccaattacattagtagtccctttcactgtcccctacaggtaaaaaacatagcctgaatttcttaagaacgtctttgatgaagcaataaaaattaatgttgttaaatcttgacatgtctctaatattctgaataagtggaaagttaatgagaagtgcttttttttttgtttttaaagaatccgtgatttaactgtgaactgaaaaatcacttttttcacagaacatcatttttatttaaaagtacaactgggccagcgcagtggctcacgcctgtaaaatcccagcactttgagaggccaaagcaggcagatggcctgagctccttcaggagttcgggaccagcctaggcaacgtaacgaaactgtgtctctatcaaacatataagaaaattagcctggcgtggtgccacacatctgtggtcccagctacacaggagcctgaggtgagaggattgcttgagctgagatcatgccaatgcactccagccaagtgacagagtgaaactcggtctaaaaaaccagttcaactatcattctcaaaaataaatgaagtgagaggttgtcacttcaagggaaatacgtatttgttcccaatgataaaatttaagctttcctgtggactttgaaaaacttgttccttctactgtaggcttggcagcttttcaatacttaaaggcgtgttaaagtaagattggtggttaaactaaaagtgatttttgacacaataaaacataagccaatatattccaagtaactaatgcatgatattataaatgcaagtatggagcaaaagatccatttactgtgcaagaaagatcaatgagtactgatggaataaatttattaatatgtaaaatgccaccgtaactaatttaagaaaccaccacttgtgaagttttgatttagtgttttaacaaatacccacaactgtctgaaaactttaaaaatacaccttctaccaactacatatttgcatgaggttaggtcatcttattgcttctttttctctttttttgagacagagtctctctctgtcacccaggctggggtgcaatggcgagatctcggctcactgcaacctccacctcccaggctcaagcgattctcctgcctcagcctcccaagtaactgggactacaggcatgcactaccatgcccagccactttttgtactttcagtagaggcgggttttaccatgttggtcgggctggtctcaaactcctgacctcaagtgatccacccacctcagcctcccaaaatgctgggattacaggtgtgaaccactgcgccccaccagcttattgctttttttgtttgtttgtttagacagagtcttgctctgtcacccaggctgcagtgcaatggcacaatctcagctctctgcaacctccgcctcccaagttcaagcggttctcctgcctcagcctccagaataggtgggactacaggtgcgtgccaccatgcccagctaagtttttgtatttttagtagagacggggtttcgccgtgttagccagaatggtctcgatctcctgaccttgtgatccgcccgcctcagcctcccaaagtgctgggattacaggcgtgagccactgtgcccagcctcatattgcttctttgaagcaaattgcaaagaaagctctagagaatccatttgtctcctattaagctcaacatgagagactttaaataatataaacaaatgacacactttttactcaactttttgttgtagaaaagttttttttcaatgaaaaacttctgttaacaatactgttctcaaggaatattttctgtttttataacctgggtcatgggttactactgacatctagttggtagaggccatgaatactgctaaactctctgcaatgcacaagacagtccttacaacaaagcattatctagcccataatatcaacagtggtaaggctgtgaaatctaaactaaaaatagattttgaaaaaatttcaattgtataattctaccacactaaatatcaatataatcaatataagcatatactctttgagattctcaatcatttaagaattatgagagtcttaaggaacaaagaaaatacaaataatttgcttcgatattttagtaggcacaatacagcttatgatgtctagagctgtgacctaacactgagcttgatatcttgcaaagtaattagctagaataacaagacaggtttctaaaaagctcacctttgtgtgatatgatgaggtatctccaaggtcacactgtggaaggaaaaaaaattcataacaatagatgttatcatttgttaggcctgaagacattttttaaaaggggggcagaggaaactctcctagcggccctgaaattcaaatcttctagttcagaacagtaccataagggcactttgttttcatttctttgttttttacaaaaatatgagaaccaaaatgcaaggaaatatgccgttagaagacgcgtttctgttggtgattacaatatataaataataacagatttccctgttatatgcttttctaccgatgaaacctttcgtcccatgcgatttattttatgtatttatttattttttgacccagagtctgtctctcttgctcagactggactgcagtggtgccatcttgactcctcacaacctccaccacccaggttcaagcgattctcacgcctcagcctcccaagaagctgggactacaagtttgcgccactatgcccagataattttttttggggggggtgggtgggtggagtttcgctcttgttgcccaggctggagtgcaatggtgtgatctcggctcaccacaacctctgcctcccgggttcaagagattctcctgcctcagcctcccaagtggctgggattacaggcatgtaccaccacgcccagctaattttgtagagtgaggctcaaaacaactgagggaaggtaaatctcaattctactaataggtctacacaatattagcactttttaaaaagcctgtaacattagcatgtgagatggatatgtctatagtgcttcaagtagttttcatctctgaaataattttaaaatcacagaatttaaagttacatgctggaaaggaccaatgaccttatgtgacatttaattcaacactcgttttacagatcagggaaacaaaccttaaaactgacttgcccaaggtcccaccaaataggagcagtttctcgtcctaaactcaaattaagcagtggctctcaaactttgctgcacattaaaatcgcctgagaagctttaatatctgcctcatcttccacatgagacattttaatttaattagtattgggtatggctttgggcatcaaggttcttggtaaacgtttcccaggtgatttcaatcagcagcaaagtttggaatgattgagctggggtgaaaatcagaatcttctgggatgcttttcttcacagaaagatgcctcacatccatcctgattttcctaaaaggcttctcagtgcctacagatagagggaaagtggagatgggaagatacatgtatttgcagacttgcattttgaaaaaaaccttgcataagtgatctcagcgagtgccacctatcccactgacaacagtgcactactgattcatgataaaacatttttcaaaatatcttcttgaagccaatttgccctattaatttgttcaataactttatttcaccaatagtgaatacaccaaatgattatttctcaaacttgctggtggcaaattaaaacttactatactctcaaaagtagacttctaaaaagtagaataatgaggaaaaaagcacgaaattagtttcagcaaaattaatcttcaaagctgcttttgaattatatgctaacttatcaaaatctttggaactcagaagaagccagggactctagtcaaagtaatttttgtgtatgtgtgctcaaagatttaagagacttggctgactacagacatttagtgattactcaataggtcccaaagctcaggacttgagacagagtttgagtccagtttttgttcgaaacacaatttcctctcaactattgttaaaagggagggaggaaagtgacattattatgagtgtaaacttgccacttttaattgaagtaaaagttattgacaattgaattagctaaaaaggctagtgcatctgaaacaaaattgtttataagctagttatgtttacagaatgaaaagttaaattaaagataaagacattaatattctaaattaggactttccaaactgtgttctaaaaatcaagactaataacccaaggagatgagaataatgtacactggacggcccctgtggagctggtggtggtgttggttgttgttccttttaaaataaacttcatctcagggtgctctcaaagcgcatctttgtggcccacgaggtgctcatgcacaatgggagaaattcaaatgcagatacactgtggtgccagaagaagaaaagctgttccttcttccaaggataatgtccaaagtagtgcacactgatttgggcctatgatgcattgaaaaactaagtttccacaaaaaacattcaataaagggaacctatccttctcactgtgttcaacattgtctaaaggcataaaggcatcaaaaagatacactgtttctgggtttgcttctttgctaactgatttttccttccaccacgacgtctaagattaaaagagaaactgatacttaatattgagaatctggatatcaatatatggttgactccaatttcttaagctgattgctgaagaggacaaccaaatggctgaaataatttccgaataaaggaatctgtccctcggcagcatagttgtactcacgatattattgtcattgtaagataatgctggctggctgtgctgtcatcaaggaatattgtcgaacacgagctgtattgttgactgaaacgctcagtagatacctgaaggggaagggaagtgtaagtcaaatttatcaaagtgtatttttttctcagttaaaatgtcaaatgacaaagcactaagatatgtcttacactccatgaactgcctgagtgtggtatcatgtgcactctatagaaaacccattggaggctctcaacttccagagatgatgtttaagatatgggttataaaatgctgcccttaatatggtacctgtcatcaaacctaacaaggattttatgaattaccgttaaaaataatgggaaaagtcggcttcgccgggcgcggtggctcacacctgtaatcctagcactttgggaggtggaggcgggcagatcacgaggtcaagagatcgagaccatcctggctaacatggtgaaaccccgtctctactaaaaatacaaaaaattagccgggcgtggtagcaggcccctgtagtcccagctactcgagaggctgaaacaggagaatggggtgaacccaggaggcagagcttacagtgagccgagttcgcgccactgcactccaggccgggagacaaagtgagactccgtctcaaaaaaaaaaaaaaaaaagaaagaaaagtttaaaatgagatttcatatttttttctacagcaataaaaagcagccaagaatttctattaattaattaattaatttatttatttatttatttatttttgagacggagtctcgctctgtagcccaggctggagtgcagtggcgcgatctcggctcactgcaagctccgcctcccgggttcacgccattctcctgactcagcctcctgagtagctgggactacaggcgcccgccaccatgcccggctaactttttgtatttttagtagagacggggtttcaccgtgttagccaggatggcctcgatctcctcacctcgcgatctgcctgcctcagcctcccaaagtactgggattacaggcgtgagccacggcgcccagcccttctattatttatttactacgataaaatgtagtgtattaaataatcctgctacaagagcattttattgcagtgaatacaagactaatgcatttactaaattactaatcctaaatgtattatttcaggtgatattgttacaaaagaagtgcttcagattcaggggctctgtgtgccagggctgctaggccaccaacaagtgaggaagccataggtttctctagtcctattttcttatgtggaggataaaaagagtatcacttaaatattctctcacaccctaaaaacaaatgacaacttaaaaaatctaactttcacttcatgtttaaataagactgccaagacatgactcaaatgagactctcggagaatactttgcattcacttcaaaacttgatcaattgcattctataaatcatctgacctgcacctagccattttcctgctctacccctgctctctgcctagaatactgcttttctctttccttgcttcagcaagctcgactccatctaccctcttggatctctttgtcggcagccacaccaaaaaatgtatttttatacactaattagttgaattcaccactgcttacaagatgctaattcctgcagagtattcccctcatgagaaagtatgcctctccataagagtaagggagggcccttactcttcctacctccagctgctgagcatagaattttgagtaaatccaaaacttcgacaagtgtttgacaattcagttatcatttggaaggtaagtcttactacatttaattacagcaaaaacactactaacagtttactctttataggtattatttaaggtagtcacaaaatagaaacaaataatctaacgtcagtcagcataaatgagagtatgaaattttacaatatttaacaagaaatggaaggggttacttagtagttttaaggtttaatgacaaaaactagaaaataatcgtacctagtaatttagtaagtcaaaaccaaagccttaccatcaaaggtgcagtacccattggatgcggatgcccacgcactgacttctgctgtacctgctgcctctcattttaacccattaaaaatactaaagttgttttccttgtagacatctttcacctccttggttaggtctattccgaagtattttattttattttagtttatttttgcagctatcagaaaaggggttgagttcttggtttgattctaagcttggtcgcttctggggtataacagagctactgatttgtgtacattaattttgtctcctgaaactttgctgaattcatttatcggttctaggagctttttggaggagtctttagggtttcctaggtatatgatcatatcatcatcaaacagcaacagtttgacttcctctttactgatctgcatgccttttattgttttctcttgtgtgattgctctggctaggccttccagtagtatgttgaatacaagtggtgagagtgggcatccttgtcttgttccagttctcggggggaatgctttcaacttttccccctttcagtattatgttggttgtgggtttgtcatagatggcttttattacattgagctatgacccttgtatgctgattttgctgagggttttaatcataaaaggatgctgcattttgtcaaatgctttctctgcatctgttaagatgatcatgtgattttttgtttttaattctgtttatgtggtgtatcacatttattgacttgtgtatgttaatccatccctgcatccctggtatgaaacccatttgatcatggtggattatctttttttttttttttgagatggagtctcgctctgttgcccaggctggagtatgcagtgtggtgatcttggctcactgcaacctctgcctccgaggttcaagcgattctcctgcctcagccaccagagtagatgggattacaggtgagcaccaccacgcccggctaacttttgtatttttagtagagatggggtttcaccatgttggcctggctggtctcgaactcctgacctcatgatccgtccgccttagcctcccaaagtgctgggattacaggtgtgagccaccgtgcctggccagattatctttttgatatgccgttgggaactacaaaacattgctgaatgaagtcatggacacaaacaaatggaaagacaccccatgctcatgaatgggtagaatgaatattgtgaaaatgaccatactgccaaaagcaatctataaattcaatgcaactcccatcaaaataccaccatccttcttcacagaactagaaaaaacaatcctgaaatttatatggaccaaacaagaactggcatagccaaaacaaaactaagcaaaaacaacaaatctggaggcatgacattacctgatttcaaactatactataaggccatagtcgccaaaatagcacggtactgatataaaaataggcacatacaccaatggaacagaatagagaacctagaaataaactcaaatacctatagccaactgattttcaacaaagccacctaaaacataaagtgaagaaagtaaaccctattcaacaaatggtgctgggataattggcaagccacatgcgggagaatgaaactggatcctcaactctcatcttacacaaaaatcaactcaagatggatcaaggacataaatctatgacctgaaaccataaaagttctagaagataacattggaaaaacccgtctagacactggcttaggcaaagacttcatgaccaagaacacaaaagcaaatgcaacagaaacaaataggtgagactcaactaaagagcttctgcacaggaagaggaacaatcagcagagtatacagacaaccacagagtgggaggaaatcttcacagtctatacatctgacaaagggctattatccagaatctatgaggaactcaaacaaattacaattacaaaaatatggaaccagcccaaatgcccatcaatcaatgagcggataaagaaactgtgatatacatacatatatatatatgaggaataccacctcagccataataaggaataaattaatggcattcccagcaacctcgatggaagtaagactattattctaagtgaaataactcggcatggaaaaccaaatatcatgttctctttcagatgtgggagctaagctatgaggatgcaaagccataagaatgatacaatggactttggggacttgggggaaaggctgggaggagggtgagggataaaagactacaaattgggttcagcggatactgctcaggtgatgggtgcacctaaatctcacaaatcatcactaaagaacttagtcatgtcaccaaatgccacctgttcccccagaaacctatggaaataataaataaataaataaagtacagcatttttctcagcaaacataaaataaaacaaagactaaagtttatatttttcactctccttttgggcaggacaaattttatatatgtttttaaagaattagtaacttttttcctttttccgagacagggtctccctttgttgcccaggctggagtgcagtggtgcaattatagttaactgcagcctcaaactcctgagctcaagcgatcctctgcctcagcctcctgagtaggtaatatgaaaggcgcataccaccaggcctggctaatttgttatttaacctttttgtagacatgaggtcttgctatgttgaccaggctaaaaatgaacaaatcttaattaacttaaatatttctaacactttgggcattcaggaaaacagctccatatatgttgtgaagtaatgggaagtatatggcagtggataaactttgaatgaaaatattaaacaaggccttaggagaaaagtgtaatatgcttattatacatacattaatttaaaaagttctctgccttaatatcattaattatactcaaattagactttgatttaaacataggtcctaaatttggattaaatataatagattgaccacaaatttatttcatctccctccggaaacctcattagtcataaaataaaggttacacccatgaccagcacagaaggttgacagagataatttttaataaatgctgagacataaaagtagataaaggagtggtaaataacacagaaacacaactttggtgcctacagaaagtgactggaacagaagcaagccagtttgtcttgcagaactaaaggcaggttgtgaacttacaggcaaatggcactttggaaagcagggtaaaatgtaaaaaaaaaaagccagcaaggtcagttgcaaatctctaactagagcctcaagtccacctgtccttccatctgacaagaaacttagatgtgtgttctctggatatatcaaacctgagaatttctggctcagagacaccatggcttaaacctgagatataaagaaaactgtacaccaaaaatggaactccaactttctgcgctaactctgcttttactttccaggcctgcttttactttccaggcagaaaattgggagatccttctcagaagaaactgaaatgtcttcaataaagatccccaaataatacactgaggtctcccaaatgaaaagctagtcaggcttctaaggcctcacactgagtgctatcagttaacagaaatcctgcttccaaataaagcaggccagggaccaccacacattggagggaagcctccaagaaaagagatcaaaacaatagaaaaaaggaattgataggaccagtcaaaatcaggagcaaaacttaaaaaaaaaaccttaaaacactctcaaaaaatataaaattcaatagaaatagtagaggataaagtcacagaatatcccagaactagaataaaaagacaaactgaaaaaaatagaaggggaaaaattaaaaatcaatgcaggtgtactggtctaagcagcctagcatctgaataacaagactatcagtaaaaaagtaacagagaaaataaaaaaaaattctcaagaagagatagtctgcaggtttagtagcctcaataaaatgaaaagatccccaacaagctgttataaaatttcagaaccttagagagagagattctaaaaagcttccgcagataactaaaacctggttgtaaataacgtatcacacactggcaatagattcaagaacaacactgtaataagagcacaactgcctctgcctctgcctcctctgcctcctctgtctcctctgcctctgctgcctctgcctctgccgcctccgcctccgcctccgcctctccccacagtctccctctgatgcccagccgaagctggaccgtactgctgccatctcggctcactgcaacctccctgcctgattctcctgcttcagcctgccgagtgcctgcgattgcaggcgcgcgccgccacgcctgactggtgttcgtatttttttggtggagacggggtttcgctctgttggccgggctggtctccagctcctaactgagagtgatccgccagcctcggcctcccgaggtgccgggattgcagacggagtctcgttcactcagtgctcaatggtgcccaggctggagtgcagtggcgtgatctcggctcgctacaacctccaccttccagcagcctgccttggcctcccaaagtgctgagattgcagcctctgcccagccgccaccccgtctgggaagtgaggagcgtctctgcctggccgccccatcgtctgggatgtgaggagcccctctgcctggctgcccagtctggaaagtgaggagcgtctctgcccggccgccatcccaactaggaagtgaggagcgcctcttcccggccgccatcccatctaggaagtgaggagagtctctgcccggccacccatcatctgagatgtggggagcgcctctgccctgccgccccgtccaggatgtgaggagcgtctctgcccggccgccccgtctgagaagtgaggagaccctctgcctggcaaccgccccgtctgagaagtgaggagcccctccgcctggcagcgcccccgtctgagaagtgaggagcccctccgcccggcagccaccctgtctgggaagtgaggagcgtctccgcctggcagccaccccatccaggagggaggtggggggggtcagccccccgcccggccagccgccccgtccgggaggtgaggggcgcctctgcccggccgcccctactgggaagtgaggagcccctctgcccggccagccgccccgtctgggagggaggtggggggtcagccccccgcctggccagccgccctgtccgggaggtgaggggcccctctgcctggccgcccctactgggaagtgaggagcccctcttcccggccaccaccccgtctgggaggtgtacccatcagctcattgagaacgggccatgatgacaatggcggttttgtggaatagaaagtggggaaaggtagggaaaagattgagaaatcggatggttgccgtgtctgtgtagaaagaggtagacatgggagacttttcattttgttctgtactaagaaaagttcttctgccttgggatcctgttgatctgtgaccttacccccaaccctgtgctctctgaaacatgtgctgtatccactcagggttgaatggattaagggcggtgccaagatgtgctttgttaaacagatgcttgaaggcagcatgctccttaagagtcatcaccactccctaatctgaagtacccagggacacaaacactgcggaaggccgcagggtcctctgcctaggaaaaccagagacctttgttcacttgtttatctgctgaccttccctccactattgtcctgtgaccctgccaaatccccctctgcgagaaacacccaagaatgatcaattaaaaaaaaaaaaaaaaaaagagcacaactgcaaaatgtcttcagaaccataaaatttagattcaacctagaggtgtactctctatcaaagaggagggattttaacatctccacccaggaaaatgtgttcaagtacaactagagaccataacaggacagaaggaaacacagaatctaggacacaggcgatcccacacaagacagcagttacgtgagatcccaaaagactttaaggagttagcccagaaaagcagacatcaagcatatctagggaaacccacgctatattgaactaggatgacaaaaggccaaagaaagttgccccccaaacaaacataaaaagcaacaggtgtgttttcgcagatggaaaatatctttgaaaggcatgtgataaatgctacaatacttgggggaaaaacagctgttagaaaacaggcaaatgaatatagtcagaaaattagcttcatgctaaaaaataatggatgtgaaagcaaacagagcacccagaggctacttaacgatatttggatagataaactaacgtaggctaggaaaaaagaagatccagaagaattgcagaagtgctcagatttcagaactgtttcagagacaggatgaaggacatgtaatgcagaggcacagtgaaaacaccatatgacttagcagtgaataatatttgcagagtcataatcatgtaaatattactgatttaattaaaaagtgtgctacaattggaagaaacacagggagaaacataagatcatggtgtagcggggaaggtatgcttttacctgctgtgatagaaagtcaatagacagtgctggcaattaacttagctattctatttttgttctttcattaaaaataagattaaatatttaaggcacttttttttttttttttttgagacggagtttcgctctgttgcccaggctggagtgcaatggcgcgatcttggctcactgcaacctccgcctcctgggttcaagtgattctcctgcctcagcctcctgaacagctgagattacaggcatgcaccaccacgcccggctacttttgtatttttagtagatacagaatttcaccatgttggtcagggtcgtctcaaactcctgacctcagatgatcagcctgcctcggcctcctaaagtgctgtgattatagacgttagccaccatgcccagccttaaggcagatcttttgaaccagactattgaaatttaacttaaatgtcagaaatctttaaaaggtggacacgctaagctaaacacttttctggataaatttaatactcaggaaaatagaagagatttagaaaatccacaaaaagaggtccatgctaccaccaccaggtccacattgtaatttaaagaaatcaagagagacatccttttatgtcaaactatcaatttcttaactatttgagtgtttacttacatggtttgtacagttgcttcttcttatttctacaactaagaataaaaaaaaaaactggtcacttctgatacaaataccataaaataaaagtagttgttaacatcttactgattactcctatgtaaaatgagacaaaattccatttaaaaaaataattttcaataatttataatttaaattatctggcatgattaatttcataagtcaaatctaaaaacttagtttttcatttagtttactttttgtttctattacatacaaatgaaagaatcctcatgtacaaaagaaaagggcaaaaaaattaggccagatgaaaaatttagctaataaaaagtttaactgttgcatatatgagccatgatccattagtattctctaattctgcatttacacatagcttactttaattatcagactctaagagctaacaactctaacaactacttcctgaccagacacctatctctagatgcaacataatccctgtaagcatcttgaaccacacttagtggttatctactaatatgtcactaaaaacaaaacaaaattaaaaaacggtctttacacaactggaaagtaacctatcttaaatttttttttttttttttttttttttttgagatagagtctcactctgtcacctaggctcgagtgcagtggcgggatctcagctcactgcaacctctgcctcctaggttcaagcaattcttcagccttagcctcctgactagctgggactacaggcacgtgccaccatgcctagctaatttttttttgtatttttagtagagacagggttacactgtgttagccaggatggtcttgatctcctaacctcgtgatccacccacctcagcctcccaaagagctgggattacaggtgtaagccacagagcctggcctaaattttgatgttaaaatgagtatacaaacctaattggacatggtgtctgcagcacaaaaaatcattttttttccctaaaaagaggccagaataataaaagccccaagagggacttgggccatgctttgtttcccacactgcctctgcctttgatgctggaagggccttgtaggcaaaagttcctaccactgaagagtgagggacatggaatagcttttcttttactgcttccatgctctctaggtgtgagaagcccatggctccggaaggaactgggaaatacaattctcatatgttttggatatgttgcccctccaagtctcatgttaacatgtgacccttaatgttggagatagggcctagtgggaggtgtttgggtaatggcagtggattccttatgaatggcttggtcccatccccatggtaaaaagcaaattcttattatggtaatttaaaagactgtggtactggccaggtgcggtggctgaagcctgtaatgctagcactttgggaggctgaagcgggtagatcacttgaggtcaggagtttcagaccagcctggccaacatgggtgaaaccctgtctctaccaaaaatacagaaattagccaggtgttattgtgcccacctatagtcccaactactcgggaggctgaggcaggagaattgcttgaacctgggagatggaggttgtagtgagccaagatcatgccactgcactccagcctgggcaacagagtgagactccatttcaaaaaaaaaaaaaaaaagagtgtggtaccttcccccttcccctctctcctccctctttcactgtgtggaaccacctgcttcccctttgccttttatcatgattgtaagtttgctgaggccctcaccagaagtaggtgttaaagccatgtttgtacagcctgaaaatctttgagccaattaaacctctttttgttataaattacccagccttaggtatctctttatagtaatgtaaaaaatgaagacaaattctaaccagaaataactgactcaagatgggcaaagtctactcaaactataaaaacaaaggttacaaactcccgtgttttactgtgctgcattacttcgcatattattatagaaccctcacttgtattcttgctgtttaagtcaactggaaaacttggctgtgtatggcttgttggcaaataaatgaggatttaacataacattaagggaaataagcaggagtagggcatgtttaaatttacattacatcaaatgaaaaagttaataacctaaaacttttgagtagcataaacttggatgtggtaaatgaatgtggtcagaggtctgcgtaagaggaggcccaaatcacagattcaatccctgatgataaacaactatgttttttaatttgtttaaatgaaaaccaagctgaagcctaagttctatcattcatctttaaagtgtactttttggagcaagggaaaagggattataaataaagataaatccattaattataaataaagataaatccaaaaattataaagagaaatccatgactcctccatcacatgacaaattaattgtgttgataaaaagatggcaaaatgtataaacaaaaaggttacacgttttcactaacatcataacaactaaaggaaagtatatcacatattaaaataagacaagtgaacatgtgaaagggtgaaaaatttaaaccaatatgagtttttctaaatactttctataacctgatcaaacaagagcttttattctttctcttggcggaaaaaacaatgttgtctcaccatctgtttgagagttcctctggaatattgtgcttgcctctggattggcagaagggttaaactccaaagctatatgcatagaggaagaaaagaaaaaaagatgtaatcattgataaaaatttatcaactcgtttattcaactgctgcatttaggctatttcactatctctactttgattcttatacattgaaatgaatgtatagacataagatagagccaggcaagatggcacatgcttgtagtcccagctactcaggaggctgagatgggaaaatcacttgaacccaggtcaggaagttgaggccagcacgagtaacacaatgacaccctcctttatttaaaaaaaaaaaaaaaatgaagaggtaaattttggctttgagttgtgtaaaatcaactttgcataaaataaatcaagatggcagtaagttttaaaagacaggtctattttacaggcaaaatataagatgtattctagagtttttaaaatttttaaaaagtaaattcatcatatctgtcacttccatttcattctgaggacacagaaccttagttctcttgagtagctgtcttccatagtcatgtgatatctctaagttttcatttcttcattagcaatacatagggagaacatacacaggccttatttgtattggaaagggccaagtgagactacataaactgtgttgtaatcctaaagaatgacaataaagagccatttttgggctctcatccaacactacccatctactaactggtgtgtaacatccatcaggctttcctaacatcaccaagcagagtataagtttacacaagtacttatgtgctttgtgtataaaggtacaatcaattaattcacataatacatttgtttattctaaagcaatccttaaatatcttgaaatgtgaagatagtacttccaagttacaaagtcacactcataatgagtcttaattatcctacctctttaaaaattaagagcccaaccaaagtttaaatagaagagctataagacatttcctctacagtaatgaaatctctggcatttaaatgaaaccaataagccaactggatttaatatgtttatgatgcaatgttttctattttgaaaatttcagtttttattcaagaaccatattattacccagaattacttttacttagattcatctctttgcaaaattttagaggcaaaccaactaattgttttctcttttctaccagctcccatcccctgcctctgccagcagtgtagagactaaaaaactccaactttctttccttttttttttttgtgagacggagtctcgctctgtcacccaggctggagtgcattggcgtgatctctgctcactgcaacctccacctcccaggtccaggcaattctcctgcctcagccttgtgagtaggtggaactacagtcatgcgccactacacccagctaatttttgtattttttttttagtagagacagcgtttcaccatgttggccaggctggtctcgaactcctgacctcaggtgatctgcctgccacggcctcccaaagtgctgggattacaggcgtgagccaccaagcccagccaaaactgtaactttcttatctttgaacaagatgctattgtcaggaggggaagggacaaagggggagccacggcaacaaacactcttacagggaaggtctgacattttaacctgcaatctttatattacatattaaaagtctacattgacatttcatgtcttttgaaagtgttgaccatgaaccaatccccacctctcttttagaacaaggaggtaaataaagtctgttaagtcaccagcataaatctggagacacattttctgttaaagtaagaattttaaagtaatcagagcctcataggtaaactcctttgagaaaccccaaacacacacacacaaccatttttctgcagccccggctgtgacatttcacacctttcacaattattttaagcactcttttttctttttccttctgtgttcaaattacagttagaagaaactaagcagcttctatcaaggtgacttaaagcagcccattaagaataccatatagcctctcccgtggcaacctccattctgattttaaataagaaacccccaaatatttgaataggaactgtcctgagatttggctactttaacaaaggaaacaattaggcacttacctggttccttcacttaggtaccatctggataggtacaaagaaaaaataagatgggtactgaaaagttgggatatttgagtttttattgagaaaaggaagagaatagctcaaagaagcctaaacaaagtcccacaggataataaacagagctacagacactgttgtctcaccatctgtttgagagttcctctggaatattgtgcttgcctctggattggcagaaaggctaaactccaaagctatatgtatagagggagaaaagaaaaaagatgtaatcatttataaaaatttatcaactcatttattcaactgctgcttatttgacaagagccataaataaatggtcccatgccagcctgggagaatgagatgagagagcaagaactgggcgattgggaggggaggcgaaaagaaactgactggactcggtgaggaaagactaaggggtgggaattcaaggcagagccagcttttgttcctggccagcccccgggaaagctggctacaagcagaaaggagctcaaagtgggggatgccgtaaagggaaccttggggacagcagcagccagaggcaaaccgagggtagatggcacctatcacctccttaccttcaggcatctcctggtcacgaatgtggtgcatgtggaggtcctcaccaacttcaacggtcacctcagcaggctgcacagcagcagccatgggcgctcctgccatcctgtccccagctcctgcctcatagatctcagattcagagggacacaccgacccctgttgctggtcaaactcgaggctgacgctagggtgcacacaacaggtcagtatgttccccatggggcgcctctactgtctgccaccacctgtgcctctgctcacagctttggccacacactcccactgtcctaggccgaggctatgctgcacttgcagagatggtcttcccgctcctcgcctgcccacctcacagcgcggccccgggcaccatccctggccccggccccggccccggctagggctgcgggtcaaggcccacaccctgctgcctcccctgagttgacttgtctgggagggtgaagaccagctggcttatttaataggttgtgaacccaacaagcgctgagagacacaacaactgcctgaagagagaacagacggagctcctcctccttctgtagtcacctacagactgaagcccactggccccaggtgggagcccaggcatgtggcacagaatgccccaccccacacttcacaatgccctccccgacacctcacagtgccccaccctgcctgccacccctccccaacagctcagaatgcccctgccttggctgccccaccctgtggcttatgatgctgctgctctcctggcccctcgtgcagtgccagtgggactaaggttttcattcatcaccaacttcctgagattttagtcctaagaaaagcacagggtagttcattgcttgaagccatcttcctctatgagttctatacaaagcctcagtagagtgggtcccattagcaaccaagttgaacaacttttatttgctgactgaatatagatacacctgaattgttgactgcttttgtaactaaacactcctctcctgtcttccaacgagtggtcatttttgtccgcaacgtgaccacagcaatccctgcggccctagctctactctcaataaagagttatggctgtgtgttttgaatgacaccttaggacccatcctgcctccacctccttctccataaaatagaaacctaacttgtccctccaagctctgaaatgctgaaacttaccaactcccttttctccccgctatttcttccttccatggcagggactttcagattttctttcttttactaacaaggcactaagcatgattttctcatacagaatcgagagccataaagtggcttaccacagtcctatttcaataaagatgaatacttgacatctggcaagtagtgtgtgcctgacagtgtccccactgtgctatgctcatttaaccctcagaaacaatctcatgttacagattttacagaagttgttgagacggagaaggtaagtaacctccccaaggtcacatgactgctaagggtggggccctggtttgatcccaggtagtctgaattccccaattgcttaagcatgattatcagaaagtatagcaatctgttttcacactgatataaagaaatacctgaggttgggtaatttttaaagggaagaggtttaattgactcagtttcacatggctggggaggcctcaggaaacttacaatcatggcagaagggcaggtccgacttacatggtggccgcacagagagtggcaacatgtgaaggagcaactgtcaaacatgtataaaaccatcagatctcagctgggcatggtggctcacacttgtaaccctagtactttgggaggccaaggcaggtggatcaactgaggtcaggagtttgagaccagcctagctaatgtagtgaaatcctgtctctactaaaaatacaaaaattagctgggtgtggtggtgcatgcctgtaatcccagctactcaggaggctgaggcaggagaattactggaactcaagaggcagagactgcagtgagccaagatcgtgccatggcactcctgcctggacaacagagcaagactccatcctaaaaaacaaaacaaaacaaaaccctataagatctcatgaggacttactgaatatcacaagaacagcatgaggataactgcccccgtgatctgatcacctccccctaggcccctccctcaacacatcaggattatggggattataattcatgatgagatttgggtggggacatggcaaaaccacatcagaaagtaaaggtagaagtcaagcttggatgggaaatgacattgtagattattattattattattattattttgagatgaagttttgctcttgttgcccagtgaaattgtttctctaatttcattttcagattgtgtcttgtagatgtatagaaatacaattgataaatgattctggctattaacgttttatgcttcaaccttgctgaacactattttttttttttttttttttgagacggagtttcgctcctgttgcccaggctggagtgcaatggcgtgatcttggctcactgcaacctccgcctcccgggctcaagcgattctcctgcgtcagcctcccaagtagctgggattgcaggcatgcgtcaccatgcccggctaattttgtatttttagtagagacggggtttctccatgttggtcatggcctgcctcagcctcccaaagtgctaggactacaggcatgagccaccgtgcccagccagattcgtatatttttaaaagaattttttttacttttttttttttttttttgagacagagtctcactctgttgcccaggcagtggcacaatcattgcccactgcaacctccacctcctgggtccaagtgattctcattcaagtgcctaagcctcccaagtagctgagattacaggatcccgcccccatgctcagctaatgtttgtatttttagtagagatggggtttcaccatgttgctcaggttgatctcgaactcctgacctcaggtgatccacctgccttggcctcccaaagtgctgggattgcaggcatgagccaccactcccgaacagaacaacatttttttgatgtggattttaaaatgcctccccttctttcaacattgattaagtcccttctacatgccaggcactgtatgtgtgaaatagtcccaactctcaatgagtgtaggcagatacacaaacaaaggcttaaggaggtcagttttctgagaccatactgctggatagtatatgaacctgggatacaaatccacctctatttgacctcaaatttgatgctggggtggttttaattttattctgggaatttcagtcattgaaccataaaaaggtgaaaagtctctgtcagatgtgtgtgtagtggtctgtataataaggactgaaggaagcaaccaaaccaattaagagactttctctaaaggcagagtaatgctaagggcagtggcagtgacaaaagtggaggaaaaaatctgtgatcatttgggagacagaataggaagtgcttggtcatgagatgtgaaagaagaggggaagtagaaggaaaacagagctgctcaggctctgctggggaagactgggtatgtagcagtgccttcctcctggccgagaatgtaggaagagaaataggtaaggaggaaaagatagttttttactctcagtgtcacattaaaatggaactctctggtcaaaagttgaatataaatctctgtaggctaagtccatttgtgacatcccaacatatgttttcaaaaataacatactaaatcaagccattaagtgtaactggggaaatttcctaaaatttacatgctaaaaaatcaccatttttcatttattagtttcatggagcaactttgaatctatggttacagcaagtgagacaccttgtataaaataaaactaatacatgaaaaaaaaacatttaaaattctattgttctcagagaatggagaaagcaattgaagccatgggcgtggaggtgactgccttgagaagttgtgtatagtaaggagaactgggaagaaagaagacctggagaatagggtgatttacacggcattaagtgaagcttgcaaaagtgagcactgagaatcaagagacctgcgtatgaatcaggaatggctgctcctatgagttgttagaaaggagatgatgccttcttttcatatctataacagcagcacctagcacagtgcctgttcaaagtagtgaactggaggtgagaaaacaatcacacaaactcagggcttgtcttcccaagtatttggctgagaagagagatgtagtattaaagggagatatgtggtaaaggaagacttttattccaagattcaacaaaagcgtgagtatacttctatgttaaagggaaagagccaacagagaaaacacatttttgaggttagaagagaaggaagaactaatgcagaagggccccaaaaggcacaggtgcatgcaatccggatcagggacagattagctttggactcctacaaaagcaagaagggagaaaggaccatgtgactctagagatatttctggtaaaggaaaggtttaggaaaagatcttttgatgacctttattttaacagactttttttttttttttttttttgagatggagtcttgctctgtcacccaggctggagtgcagtggcacgatctcggctcactgcaacctctgcctcctgagttcatgtcattctcctgcctcagcctcctgattagctgggactacaggcacccgttaccatgtccggctaattttttgtatttttagtagagacggggtttcactgtgttagccaggatgttctcggtctcttgacttcgtgatctgcccacctcggcctcccaaagtctgggattacaggcgtgagccactgcacccggctagactttaaaaaaaaaaaaactactgtgggaaaaaggatattatgtatagaaaagtctacacttcttgatacaactaactaaaaaaagcctgatacactaaacaaaacccaaataatgtcttccctaaaagtgggtaacttgaaaagcaattcaagcaaaaatcaaggagttcaattataaatatcaacaaagtgaaagatgggtttaatttttcccacaaaaagttaaaagaaataacagcagctttagaggaagaggaaaaaatgagaaaattatatgcagttgcaaaatgtgtgaatatttacaaactctaacatataactacaaaacggaccagaagaatcattatcataggaagcaaagggtcatttcaaaaatcagaggagggatgattcatatttaatttaattctgtggaaaaaatttaagtaacgtttgaggacaaaaataggtgatgtgttgaaatgcgggaaaccacagtggaaggaaaaagaattcaagaaagctcagtttcagtaaccagtatccagtaaaaatcctcaggacctagaggctacaatctacattaatagtgtctgaagacctagaaatgtcattaaataccattttggataattcttgtagacttgagatgatgtctatttaaagttacaaaatagtgcccatatttctgtattcattacagaaaacaattggatatggaaaagaaactaacatgctatgccacaatctctaaagaaagattagggaagtttcagcttaaagcaagaataatcacaataaagttttacaaccctttgcaagcatatatgaaaaacatacaaaaagtttgtaatgatcttttcttaagctaagagaacagaaaaaatgagaaaaattaaattataaaatgaaactttggtttagaggtaagaaacatttgatgacagtcaagagatcagggttgtacagtgtattatgtgaatgttgtgactcattggtttcatcttggatatcataacttgacattttgtaaaagtgatttttcatgggagttttttcaggtgccctataaagtcctgtcccatgagaagcgaataatagtcttccacattcttgagatatcttaatgaatagcatcttctacagtcttccattgttttgaccttggagagacactcattagtgactgttaaggtacctgagttattaggtgcctgtagactatgcccagtgatatgtgcattaggtacatgctccctagctgtgctgacactgactgaagctgtgaggtttcacaatgacatgtcagccaaatacatatgctcagatttaccatttatcaagaggtgttcacactatcaattgtgcaattatcattctacacacaggagtgataaacggagtaaaaaaccacagccatggatcgggagaccaaggtacctccagaggagtccagtgggtccagaagccctttggatgttggtcagaggctcctcttgggcagagatcacagcagcagccaacaggtctggagaagtccttagagttctcatggacaaagtttgtgaaggcatcttagacaagatcttgtctttgctggttttatgatcctctgcagatgggtctattctcattatctcagccacctttcacttcctatcagttcagttcaggtctctcatgatcccaggcagcagtagttgttatcatgtgagttcattcatatatgtttatctctttggggatggggggacaacttcactgtggacttaattctactggagatgagtgaccccattttaagacaataggatcacaaattattatcacatatcatcagggcagacaatagctacaacctggggctgaaagcaggtaactccatttattctgcaaacattctgtcttgattatggtgccagttgctgtgagggatttcctttccaccacctgtttttcacaaggtttgagtctgaactgttaacattctactgatttctgggtgaagggactgactgcaccatcctagcctgtcagagcacttgccccaatacttccactttaagagttttccaccttgtccagaactacagtccattaatcccctcattttctctcttaagagaataaacaggccaggtgcggtggctcacgcctgtaatcccagcactttgggaggctgaggcgggtggatcatctgaggtcaggagttcgagaccagctttgcctacatagtgaaacctcgtctctactaaaaaaaaaatcacaaaaattagcagggcgtggtggcaggcacctgtaaccccagctacttgggaggctgaggcaggagaatcccttgaacccggcaggcggaggttgcagtgagccaagactgtgccacagaactccagcctgggtgacagagtgagactccctctcaaaaaaaaaaaaaaaaaaaagagagagagagaacaacccatgtcaagtacacacccacatccctcttatcccaaataccaaacacacaaaaatccaatctgtctccttctacctaagcaattgtagatagtcactttcccataattaccttaagctccctgacttgctgctcgtcctttctctggcaaaatctcatccttggatgagcccgacttcgtgtttgctcaatgacaccactcacctgaaccagaaaaaaatatcaaaaagtggtcagagatatcatcataaattcaaattatttacataaaaaattggccctaaatgtttccagaaatcaataaaagttttgtttctccaaagacatcatttcttcagaaacccaacgtgtataacctattttttctatgttcttctaacatttattcaacttctctcatctgatatcttgccaaatcattcaaagagaaaatatatcccattaggcaagagccgaccatattcccatcacctgagaaaatcatatgcacaggatgcgcccacctcacctttctctgcctcatcatgtcagaaaaagtacccctccatttgtcacaaggcaaatctgagataaaagatttagatggcctgtaattccagcacttggggaggccaatgcaggcagattatttgagtctaagagttcaaaagaagcctaagcaacttagggaaactgcatctctcaaaaaaatacaaaccattagcctagcatggtggtgtgctggcacatgcttgtagtcccagctactcagggtggggagcactgaggtgggaggatcacctgagctggaaggttgtggctgcagtgagccatgatcacgtcactgcactccagccagggcaacagatatttttaaaaggctcttctcttttaaaaataatcaaataaacaggtggccatgaggctgaggtggctgcagtgcactcaattcctccttaaataaaccaaaacttgactcagtgtaaataataaaaggaaacttaagcttaaccagtcagaaaccaccaactaatatctaactagagactttccactgtaatgttccaaatgaggccactgctccactttacccaatcaagtattttttcttccacattcaccatataaaattcttcccccaccctccctaagcctctctgttggaactctgagctgcttgcagtctggagctgcctagtttatacatttctgaatgctcaaatatattttctaatgtttcaaagtggctctggtgtaggaggttgttggtggagtgacctgagagtgtacaggaatcgaggccatatgagatctctggactctgcactccattttgctgtgcactcaaaactactctaaaataataatatatctttaaaaatctataactatcacgtagcccttttcaagtctccaactggttggagccagttcgattaaagctcagaaaaaactggttaataagctagttctgacccaactggcaagaagcgttaggaaagaccaaggccaggggagtatattgcacatgcatgcaccaggaaactggaggaagcttggaggcccttcagcctggtcctgagcccgctgaaactgcagttacaggcacagatgcctggggcaccaatctgaatctgccaacatccaaggccacatgaacacaaatgcgcagagtctcctctgcgatcagtagctaaggatgttaggccatgattggactaggatgggagatgaactgagaactatagattctgtaggcttttgttgtctcttcccacccccaagcaacaagtgatgaacacacacacacacacacacacacacacacacacccacacacacaccctgtagtgactaacaggatctccctccagggaatttgcagaaaggggagcagaaaacatcccaggggcctttcacagctacttccttgagccccctttcagacagtgctgtctagacctgtctcagcccaagcatcaccaccctgatatgcagaagctggcatccttacctgaagttcaacatcaagaaatgatctcttctactcaacactgatagaaatacctctaagcaacatcctcattggcaggggtggagtgggggagtttgttaagaagtgaggcctctgtctaccacctagacaacctggaaatttccatctatgccacaaagtccaaatcactggccactgccccagtgtatggcagattagaacatctctccatcggatctgggtttctattccattgagtgaaatggcttttctattacaggaacagaataagggatcaaaagggtcttacaactgaactccagtgtacagtctgcacagacactaggcttgtgcaaatatgacgcagcgaggccccaggacccttaagccagctgaatgtactgagtttcaggaaacagtgagatacattcagcaaaacagtgggcttcatgctgaaagaagtcaatccaagtaaacacacatcacacacacacacacacacacacacacacacacagacaccctagtggccaataggtcctctcaccaaaaacctgcgatcaggagagcagaaagcctcccagggctccaccactgccctttctggagccccttatcagacggccagcctcaggacagcactgtctgatcctggtccagcccaaaccgccatcaccctgtgatgtgggagcaggccacttcaccagaacctctgtggcagaaaatttctcttccttttaaaatgatgagggggaaccttcagacagtgtcctgattagggtgggtggagaggggggtttcccagaaagtcaggcagggcagggcagaagccctctgggttaactgtgtgcttttgatatgaaggcaggtaagactggacaggtgggtgtgttagtgaggggatggactagggtgtgctgaagaactccacttgggctctgcacaccagggaaaaggaccacaaaacatcccatcttcactgctcagagaaggctagatctgctgtgagctagaaagccatgtgggggcagctgatgagtcatcaaatgggagaaatctgagagccatgtgttccacaggcctctggtccttgttcaggcagcagggcactgtgagatgtggctccttggccctttccagccaccaccttgattgcctgctgcaaggaaagagactgaagcccaagaatggggtcttgctcaccataggatgatggctcagtgtgcagagctgagctatggcccaagaggcagaaggtggggatgacccaggctgagctgggggatccaactgaacatgcacttgctaagaagctgtgggctatcatgccttgggaccccagtctgggtctagaattgtagcaaaacaggctactgggaaaagttcttgggaagccaactcacttttgctttcatccatgggcaaacaaaccaacccccaccacttcccactccctctgaaagccacttggccctctgatcgaccacaccacaatggtgtcactctgtaaggcacaggtagacaaggcatccagccatgcacactccagggcccacacatgtccagaatacactggttcttgttgagactccactcttccagctcagacagaagctccccaatctcctcagccactcccaacaactggaggcctgaaaactttcatgcatgccgctatggtctaaagcacttgtggtggttttgattttcattttcctgataatcagtgatgctgagcacctttccatatgccttttcaccaactggatgtcttctttggctaaatgtctattcaaatccattgcccatttacaaatctgcttttttgtgggcttcttgacgtttttctcttttttttttcctatttatttatacaagttccttaggtattttggatatttttaaaaatgattttcaattccactgcccagttataaatctttttttttttttttttttttttgagacagagttttgctgttgttgcccaggctggagtgcaatggtgcaatcttggttcacagcaacctccacctcccagagtcaagcaattctcctgcctcagcctcctgagaagctgggattacaggcatgtgccaccatgccaggctaatttttgcatttttagtagaggcagggtttctccatgttggtcaggctggtcttgaactcctggtctcaggtgatctgtccaccttggcctcccaaagtgctgggattacaggcgtgagccactgtgcccggccaattatccctttctgtgttttttttttttttttgggggtggggggaagaacagagtctcgctctgtcacccaggctggagtgcactggtgtgatctcggctcactgcagcctccgcctcccaggttccagcaattctcctgactcagtttcccgggtagctaagattacgggcgtgcaacacatgcccagctaatttttgtatttttagtagagacggggtttcaccatgttggccaagctggtctcaaactcctgacctcaggtgatccacccacctcgatctcccaaagtgttgggattacaggcgggagccaccactcccggccccattttgtgttttaacatcagtcaacactcgtattttaaaataataacaatgaatggcggtaccttagaacaagggaattatacatctttctcttgtcctagtgcagacattttgtctataaaatgttattcacagatgaattcatgagaactttactgtgaattttaaatccatatacaagtgtatgctcgttcatgaatatttcaataaaataaaactaacagcaaaaaagaattccagagttgaagcagtttcaggaaaaaggagttggcagtataaagtaaaatagcaaaaaatgggtttttttttaaatgggtatatttgtgtctacaacttttttttaattatagcattagacaatgtgtatatatatatatacatatataaagcaatggaagtggcattgttttcatactagtctagaatattaaaatatatgtaatatgtgatcagcaaaataacggccccccccaaagatgtccacagattcctagaaccttacatgaaaatggtacatcatgcatgtgactcaggtaaagaccttcacatgaggagactaccctggtgctatggaatgaacgttgtgttccgtcaatgttcatgtgttaaaatcctaaccctcaaggtgatgtattaggaggttaagccttacatgagactctgccctcatgactgggattagcaccttattaaaggcacaagggagcttgtttgttcctctccccatgtgaagacacagcaagaaggaagcctctatgagaaagcaggccttcaccagacaccaagactgccggcaccttgatcttgcacttctcagcctccaggactgtgagaaacaaagttctattgtttataagctacctggtctaatgcatttccttgtagcagcctgtatggattacgacagtgggctatgtggatgatgacggtgtctccattcaggactaagtaagcacatgagtccttaacagtggaagagaagggggaaggaaagagccacagagacatgtggccatagaagacaggtccatgggatgcaaggttgctaatggtgacagtggagaagagcccaaagccaaaaaatgcaggcagactccagaatgtggaaaaggcgagaaaaaagatcccctagaacctctagagatgaaggtagcctttccaccacctagattttagcccagtgagatccacatcatactctgacctacaggagtgtaataaatttgttttatgccctgacatagtggtagtttgttgtagcagcaatggactaggaatatataaatatatatacacacacacacaaacactacccccccaccacacacacacacacacacacacacacacataactatatatatcctacccttcaaaattgaagcagataaactacacattagcattaacttagctgggtgtagtggcacatgcctgtagtcccagctactcaggaggctgagagggaggatcatgtgagcccaggagtttaagatcagcctgggcaaacacactgaggccacatttcgaaaacaaacaaacaaaaaaacacaacaaatctttgattaagttcatttcccaaatttgaagaggagacaattattagataaagaggagaaaagagaaaggtagagctgctgacttctgtggtggaagcagaggcacaggcccaaacatactcctgtcctcctggctttcctgtcccttctcataagggacacatgaacctctcaaactgaaccatggatcacagacccatacgcagaactcaatacagttttgttctatgattttttacatgtctgtgtccttgtttctgcctcccattcccaactcccttactctagttagaaaaaaatggctattaccaaatatgagtacatcctcatatactaatgccaactgatcaccagctggttttcttcttttacaaagtcataaatctttagactttaacacatcttccaagaatagaatgttattttccagttcattaacacaaattctatatttaaaatgaagacttcacaagttgatttaaataacatattaaccaaaatagactggccatggttcaaactgacattttaattaaatgtgatgataggttgagtaacctagcagtactctaaaatgacttttggttatggctttttccatattatgtttaggctgaggcatccctaaatgattcaattgtaattcctcttcttaaacatgagatttatctttacaaaataatttattttcttaaaattacaagttaattctatagttcatgcatacataatctcagcagatattagctgtatgtgtacacacaaacatataggtatttgtatatacacacattacataattttttaaaaaacttattagtagggtagaaccacgaagacaaagaggctttgtgtaatgtgatggaaacacaattgcaggacgaacaacaggctgctgtgagggctgcatttaccctttctgctgtaagactcggaaaaacacggatagtggatatttaatccgcataacagaaatttcagggtgcagaaaacttcccacaatttttatagacaatgtcaatagaaaggcattcaatgcagggaatacacagtgtgacagtatacaaaaataagcaggttgatggtttagatttatgagacaagagaaagaaatagtagatgatgccataattctccttttatggagttatgaaaattgttcattttatataaggtcaggtgctttcaaatgtcaatgagaaaaatattcaaaggaagaatcaaatctaagacatggagagatctttataaaaatgaccttcaggccaggcacggtggctcacacctgtaatcccaacactttgggaggccaaggtggatggatcacaaggtcgggggatcgagaccatcctggccaacatggtaaaaccccatctctactaaaacacaaaaaattagccgggagtggtggtgtgtgcctgtagtcccagctacttgggaggctgaggcaggagaattgcttgaacccgggaggcagaggttgcagtgagctgagagcaccactgcactccagcctggcaacagagcaagactccatctcaaaaaaaaaaaaagaaaaaaaattaccttcattctgagaaggtataatcatcaacacattcttgagcacaactatgcacatacgcacttccaaattcacaaaccatgcttgtgcacacactgatgtctctagattccttttttgaagagagggcaacttggtgtgtcacccaggctggagagcagtgttaggatcatagctcactgcagcctcaaactactggggtcacatgatcctcctacatcaggctcctcagtagcctgaactataggaatgagccaccatgcccagccaatgttttcatttttttgtagagatgaaatcttgctatattgcccagactggtcttgaactcctggcctcaaggaatcctcctgccttgccctccaaacgtgctgagattacaggtgtgaaccattgtgcccagcaaccggattctttattaagaagaaaatttgtttcctgacatgtaggcaatgaattgataaataatagttcacaaattactaatttacaagtcaatataaatgaggtgagtaaacacaaaaataacagcataaattaacagttcatgacttcacgtttctttttctcctttaaaatgtagctctgacagagactactacttgtccattccatggaaaagtcagaggtggttaaaatgtcagaggtacacttactaatactttgctgccttttgtgtagcttcctctcagtacttcaccagttgggattgacacacctctacagctgggttcaggagccagacagcagcacacagaacggggaatccaaagccatctctgacactaaaagcaatgaaaacaaaaataaccaaacatattatcaagaaatgaacaagagattgatatcaagtaaagcaagaagagaagaaagcatttaatctgccaggctttcattctgacaaaataatttacaacatgtatgtctctatctgacatgagtgaatagaaaaagaacccaaatacccagttgaattgcaagatgaaaatgaaaaagaactcttgcttatttgccagggtacaatctaatctgggctactaaaacactttcatgcactgattctatgtaacacatgctttattgccatttggaaatgggatttcttgctttgatttaaatatacttccttggatttctgctttaagtatactttcttaaacatattcacagttacattctcagtacaaattttcaggtgtaagtaactacttctgcttttgatagacagtataattggtgaaataagctatacttccatgtaaatgtgagagtacaaggtaagattccagcgtcaagtaaaacataacagtcaagaaaataaaaaggtgagagtaactgggcagtggggaaatcttgtgtgtggaaagaatgaatctgtaaaactgttctttcctaagagagttcagcaggatttggatgatagagagctttgtgtacaagggttccagttccacatagtttaggtctaatttcaaaggcaaattctagtgcaacctgtgactcacgctgtcctaaagtgctgtatgtaaagggtctggagataacccacaagcagcactgtgaacccctgacagcaagcctttccagataaataccaggtcagtgtctacagctgatgacagagcagaatatctgaaaaataatacttcttcggccaatggactgccagtcactattatttagtgtaaaatactgtattacatatgtgtaattttttaaattgcagtgtttcacatcgaagcaattaaatataaaaaccaaatgtttattcagcttaaaggcaacttagaaatactgatcccagatagaaagatgctttagtcccaagtccgctgttctaaaatgccacaactaaaccaacaaagggatcttgaagcataataagtgttcataccttttcaactatacctctgcttgtcttgaatataaaaacctaagctgcagttatgccacagcacagaatgtgttatattttacatcactgagccttagttttacaaatggtaaaaaatagggaaggtaaactgaggttttcttaaggagctgttacatccaacagactcatgaaaatctttgccaaatgtccccggtacatagctcctccccactgatgggctcaacggggagaagctatgcacatgtctcaatttgcatatgctcaatggcaatacaggattcccaggataaagtaagggatataaatgacacagcacactgaaaagactgtaatgttacttcagaacgttgcaaaataaagatcacagatgaaagttttagttcactgaagcatgtagtcatgtatatttttcatttgtgtgttttaaagtcttatactgcttacattcttcttttttgtttgttttaaaataattatatttggctacaaagatcaataacaaggatgatgtcagtccaggttggacaggcagttctggggcagatgttcttgcagtgttctttttttttttttttttttttttttagtatttattgatcattcttgggtgtttctcggagagggggatttggcagggtcataggacaatagtggagggaaggtcagcagataaacatgtgaacaagggtctctggttttcctaggcagaggaccctgcggccttccgcagtttttgtgtccctgggtatttgagattagggagtggtgatgactctcaaggagcatgctgccttcaagcatctgtttaacaaagcacatcttgcaccgcccttaatccacttaaccctgagtggacacagcacgtttcagagagcaaggggttgggggtaaggccatagattaacagcatcccaaggcagaagaatttttcttagtacagaacaaaatggagtctcccatgtctacttctttctacacagacacagcaacaatctgatttctttttcctttccccacacttcccctccttccactcgacaaaaccgccatcgtcatcatggcccgttctcaatgagctgctgggtacacctcccagacggggtggcggccgggcagaggggccccccccacatcccagacggggcagccgggcagaggcgccccccacctccctcctggaaggggcggctggccaggtgggggctgccccccgcctccctcccggacggggcattatactgcttacattcttatgtgggaaaatatatcttgtttgggctttctggatgaaatatgaacaggcaaaactaaaaataattttacaacccaaatcaccagatgttaatggctggtaattcaaccagaaatctgaaagacaacatctatttcactgtgatatcagtgacaaggaagattttatttgtggtatttaagtgtagtcctctggaacaaatgacttggttcacaggcagcacgcccactgctgaactgccatggcctgacagcctgtcttatttgccaaactgttcattaggtttggcaatcttcacctgtgcctccagcttatatttcagcaaataatacatatcagtctgcttttgtcatcttctgcagtgagcttccaacactcctttagcatatggtgcccctgcatctgcaatccttcaaacataccttgtatacatgtcattatttttcaactgtcaattcagcttccagcttggaggctagcctagcttaaataaagcaaaaatacaagacagagaatacgcaaagtaagtcctgcattgtaaatattaagtgggctgaccaatcatttaattaacattaaaaaagaatacattcaccatacaaatttaatatttaaatattgatttcagagcatattttggagtgaggcacaggtgacaatagagcagaggattcctctcccaattgtctctgacctatccaacctttgttacaggtcagagagttctccaacttataaataaacaacagagataatgtggcaacaaggacacagagacgtactgagagtactgctcagctctctgcctaggcctgattctgctgatccctgacaatgagtgctgtgaaatttacagcagatcaatacacatacacacaaacacacaaaagagatacttcatgggcaaaaagcaccaaagatatacaataaaatgtctgaaagaccataaaacaacttctgatgaaatgctgttttcattttgcagaagtaaaatattcaccaccaaccctgtaattagcttaaaaattacactaagtacagtaattttggatcccatctccaattcataccttatcggcatgtaataatcacactgcatctacaacaaagctggaatagactttatatgctgaatacaacttgtacagtaagaaggtaattttttgaaatactgagaatacaacatttgtatgccacactctactgcacaagttaaaagaaaatacaatcatttctattctcaagtgtattgaaataaaatacagaaaagagtattctaataccagttaacattaagagaatatatctctaaaccaaagatcttggatcttccagaaagacaaaatcaacctgtatatacttgggtaagaaaaaaaaaattaagagatcaagaaaggagagaggatgttagcatagaatcatctccaaaaatggctttccgatgcattcgaccagttttcaagtccatttgtttttcctcctttagcatcaacagcctatattaccaaggaaatgcaaaataatccaatttgtacattaaccagctaatctagaaatggcaatacagtcaatgaaaatacaaagaaatataaaaatgtcaaggaattgtttaagatgtttaagatgatacagcacagggaaaaaatgatctgataaacactggaagagttaaactcaggcatggtttcctaacaccacacttcaaatgaacttatagaaagaataaaggaataatcctctaaaaaaaatctaattttagaaaaaaattgctcaaaaggaaagttagcattttgtacatcttttggaaagctgattaatttctaagctaaatgatgcttaagataatccttaagagaaatggctgagtccaggcccaaggcagaaagagggcaacataagcctggatacttttgttctgtgagaaagtaagaaatgctcaaagattaatagagacagttgaaaggacacaggacacaggctgaaggctcccacggtcgaatctgggacagcataggcatcagaaagaacaatgacagtgatggaaaataacccatggaataaaatgcaagtgcattagtcagcagagataccgaaataaaaaggagaagtgaaagctctttgttaaaaatgccagctaacaaacgtcggaggaatgacagaggaagaacatccattttaagtcaccagtgccataactgataaagaagatcatcaagaggctaaaatcactgcataaaagaaaactatatgaagctatttaacatagcacgatatataaaagtatgaaaacataaattagaaaaaatgaaaaatcgtaccataggagatgaataagttagaatacagcaataataggccagccgtagtggcttacacctgtaatcccaggactttgggaggccaacgcaggaggattgcttgagcccaggagttcgaggccagcctgggcaacatagtgagaactcgtccctagaataacaacaaaaaaatattagatgggggtggtggtgcactcctgtagtcccagctacttgcggggctgaagagggaggatccacttgagcctgggagttcaaggctgcagtgagccaagatcacgccactgcactccagcctgggagacaaagtgagatcttatctcaaaacaaaacaaaaaaaccacagtaacaaaaaaaaacaccaggaacaacaaaatgacaactacataaagactgtatagaaaacaaaacgctcagaatatagaaataaattatgtattttacctgtaactatattagaagagagtattcttgtagacaaggatgaccagaaggatatgcaaaaatgaaaatagctaataacactcattatgtcaggaactttagtacgtagtttgtgcacattgtaacaaattacatactagattatctcaaaattttcagataaattttactgggagtcataaactaatacaacaaaaccaatgttttgcaaacatccactaagcataaaggtatacaaattcccaagaaaggctgaaaaataattcacataagccacacatcagtggaaacctacccataggagataatacaacataatctaaataaaactttcagagacaaggcatgtggcttctggacagccacaaactccctgtttctgctctagtgttttggccaccaaaagaaagccaagtggcctcaggtctcttaaaaaacaaaaaagcaacctatggaagatggcgtggtatttgaggaatatttggggtctcttgaaaaatgcatcctgtattttatttcaagaaaagactccctcataatgtcaggtaagtgaagagccctcagagacacatgcacacacaaagaaaaacaaaacaacatagaatgaatcccaccaaaatgtgttatgatggcagaattatgggtgatatgatcttctgtaatatatatttttattaaaaatagaaaaaaagcagacttacccttgattatctatagcctctgacccaagtggcttggaatcagaaaacaacatcactcgacttgaagccatcttggcatcaatggtggagtgggtggagatgagactctggaccagctcatgggtgggccccacctcgtcctgtcaagaccaccaagaaagggcacgtgaggaaagcacaaagatcctggagagacactggtttcactcagttctcaaaattatcttagacacatttcctgagaacctttcttaatgcctcaaaaaccagagaagaaaatccttataacaaagcttgaaatggatccccatctccattaaacttttccaaacctcagtgagtatacaacctgataacctaaacacctcgctagaaaaatctcagttccaatcctacaacaatgctagcttttctaacattttaaaataaccctgattttaacccaataaaattccacttcagaactaaaaatactggaaatccactttaaaataaagaatgaggagaccattgtgaatgagaaaaagaaaaagaccaatgagagctggaaagcacactgattttgtagaaacggagataagccgggcaggtgccacactggcagcagtgcccatgctggggccatggatcaaggaggcatggaggacaggactcttctgcttggtacaatgaaaaaatggtattctttttattctacatattgacaatatgcatttgggcctctattataagtacgagagaaaaatcttcaataaataaaagctgagtatattactttttttaattaaaaaatagattcggaaagaataatgagagttcagagcaatgactcctgcctcactgatgcctgaaaaccgtggctgccaccaaggtcaacatagacagcgtctttgtcatacagcacacccccaactccaaaaacaggcgcataaaccagctgctccttcttatttaaacagcacttcttttgttgttcagtaagagcacaagggtctgggaagaaactgatgtcactcatggcaaaatcttctacccctggaagacaggacccaaaaagccagcttcaactgacaagaagtcagtaagtatctactgttgactggggggttaaaaacgatgcacactccaagggcttaaaccatgaccctaaagaagggcattgtgccacactggaacagtggccctctagctacaagacaagaggtcagagaagaggcattcggtaacacctttgcaggcctacacatagctggcttacttttaaaacctccaccaaggccatcttcccttgtttggtcatttttcagttttcctgagaaatgaagccatcccaagaatcctatgtgtgattctagtatgttctacaacaagagaatacctggcatgtgaatttggcttttatttttcaagtgcgctcctcttaaataaccgtaaagtaacatctgctggtcacatctgatgtttgtttggatatcctctgggtttgtcaaatcttccaccctagaaaaataaactcaatcatacagcagaaatgaatgccaaaagttcctatacctcctttcatgtgtcagtgactcatcacactcttgtccactaagcacattgtttagaaaactagaaaatacagaaataaggaagcaccagaggaaaaggggcaggcacacaactgtgtctctaggctgaaagtgacattcattccgtaagacaccagacagggagatgacgtccacctggggtcagagaagagtaaagaacatattcagaaaatccctttctggaagagggtgagcctgtgctctgggatttgtactgtggcttggattctggcaggtggaaaaagggtattccaggctgagaaaaccacagcacaaaggaaggaaactgaaggcacacacaaaggactcaagcacccaggcacgaaggcagcatcactgaaatctgaggctgaacataggatggggccacatcctgtggccttaaatgcttccaagtcctcccactttcctaaacatctcatagttaatttactcccaaaggcacagcatctttgagcaatgatatcagtagacattttccatccactacacttctacccccactattcaaataggcacaaaataaatcctgtcactgttctttttctagcctttttagctttgaaatatatggtccaggaattaaaagtttacaatcactttttacctgtctgccaggatataaggatgagaagtctgccatgtgagaggcctaaacttcataactgtaataaaatggcccagattgtgcatttcttggttttgatattctccatgcaccattccagaaaggcagaacagcttggcaacctaaacattaaaggaaaattaaaaattaaatttcaactaaattcttgtcaatactgcaacaaaataaaagctctaaacaagaagcaatcctaagaagggagacttccagcaaagccactgtcctgaggcttgcagagccttgctggcttctttcaggacttattagaaccacacagaggcagactgctctgcagccgagcaggggcatccatctaagtatggtgaggagagggaggtgaggcctctgagcacagaaacgattctgtggctgatggaccagagcagtatggaaaggaaggggcagtgcctggtcctgtaactgggagaaacttctgacgtactccattaagtcccaacccccaaacacccagacactgcctggtgcagcaggtacagagacaaatgagatacaccaagaggcccagaataaccactcttgagggaaaccttccagagactgggaacacatacgcaaagggaattcaggaggcaaatcctagacagacgtttagtaatgtctcttcagtctgtttgtttgtttgtttgagacggagtctcactctgtcacccaggctgaagtgcagtggtgcaatctcagctcactgcaccctctgcctcccagcttcaagcaattctcacgtctcagcctccagagtagctgggattacaggtgcgcgccaccacatatgactaatttttgcatctttagtagagacggggtttagccacattgccctgagctcgaaactcctggcctcaagcgatccacccacctctacctcccaaagtgctgggattacaggcatgagccactgtgcccagcctcttcagtctattttaaaaggattatactgttagcatctaacaattatttctcttcctaccaggtaaacttctgtccagaacctgtgttttaatcgcttctttgtcttcttcagttgcttattgtgtttgaagaagtcgaggtgggtgagaactcccataattttaggaaagccatgtacttgacagatgtttagaaactcaaacgtttccatttcaaacccaaagctggcatctataagcatcagtacctacaagcagaacacattatttctcaaagaaactaccaaaacagaccacctacactaggggttggcaactggcccatcgacccaatccagcccatcacctgtgtttgtaactaaagttttattggaacatagccacattaattcatttacatatcgtctatggccgcctgtgcactacaactgcagagctaagtagctgcaaaagatatgatccacaaagctgaaaatatctactatctggccctcgacagaaaagtcccactccagactaaatcaaatgactacacaggcatcacccagagaaaccaccaccctctgacttgctctaaaaggcaaccataagacaaggccactaggatataaacatccattttaagaattctaatgcatgagaagtaactcagaaaaggctggatctaaccaggcccgtacctaagaaatcctaatttaaagaaatgaagttttctataatgtatttttaagccaaataacaggtctctgacatccaaagaatgggaagaaagtgataatcaatgaaatatatttaatatgtacagaaaaccaacctcttctttcaatgtcctcacaaaaaaaaaactttttttgctgggaagtatgcagtgtatacctctatcttgtatgttaatttgtataactcaattgctcaggaatttctttaaatagctaccagtttagaattaagtcaaaaaacagtaagattacgatgaatggtagtctataagaaaatataagcagataagaccaatttttaaaattaagacacttcaaagatgcaaatttcagaattgattcctggaaacttctagttttaatattaaagatagttctgtttttatctttccatggataactaaaactaacaaaaaatggaaacagaaatgcccatctttgattaaactaggaaacattcaaaacccgaaaccacagaatatatgaagttgggcttgtaggaaagcacagatgcctctggaaaccgaggcagcaagcagagctctccagcaacagtggaccagctcaaagaataagtggaatatcctcacaccacatctgatgccacagagtgccaaggggcaagcagctggttgtaggatcaggaagaacagggagcaaacagtccctcagctgccaatctttgtcatctaagccagtgttactcccataatccacacacacacacacgtacacacccaaatccacatatcgtttgtgcctttgctgtactcaggaggctttgaaaacccagagcagagcaatcaacataagctaagctaaataaattatggtgcgtccacagaatggaatattatattaaaaagaaggaggcagagctacagtacttactgattatatacctccaagatatattacatgaaaaaagcaaagcatagaacagcgtgtaaaataagctaccatttgtgtttttaaagggtggcatgtgtgtttatatgtatctggaaggatactgctctgcagggacctgagagaccagccttagagcaaggaaaaagaaaatgtgcattgtgtataccctgcattacagttagagtgctttaccaaatgtgtgtgctccttttgaaaatcttaaaaagatttacataggcatctctctcaatgatggttaagagactgggaaggggagcagggagggagggaaaaagagggaaaggttaacaggtacaaaaatacagttagaataaattctagtgtccaacagcacaatagggtgactataatttattatataattcagaactaaaagaatgaaattgaaatgttcccaacacaaaaaaatgataaatgtttgaagtgacggacatctgaattaccttgatttgatcatcacacattgtatgcttctatcaaaatactacatgtaccccataaatatgtacaactattatgtatccataataactaaaaataaaaaaaagtaaaggcatctcttaatatgtctttaaaattagaaacttgctacatcttaaataaaagagaaacaaatgacttctatgaactattcaatcatttcaagtatacaagatttagtaatccttacacaactttacattaataacacttatttttactaatagtagcattacatgttcaaaatttgaatgttatttagttttctgacattacagacattacaatggcacgactttaaaatctgtattaccttttactttatattttaggagtcttcctgggccaaagtatgaaatctgtagctctagaaaaaactaaataaaaatgaaaaaaccaaggtatctgtcatcccacacttcctaatcaatatggcttattttttgcttttttttttttttttttttgagatggaatttcgctcttgttgcccaggctggagtgcaatggcgggatctcgactcaccacaacctccgcctcccgggttgaagcaattctcctgtctcagcctcctaagtagctgaggttataggcatgagccacctcacccagctaattttgcatttttagtagagacggggtttctgcatgttggtcaggctggtctcaaactcccaacctcaggtgatctgcccacttcagcctcctaaagtgctgggattacaggcatgagccactgcgtctggcctttttctttctttcttttttttttttggtaatttgtattttattttagttaatttaaaagatagtttaaaaaaaagatagttaatagaatatcagaaatagtgaacattatcatttccataaatgcaagagcgtgtacatttttccacacactgagtactatctagattttctatgataaactctgaccacttcttcaggcaattcatgtacttacttattatcactaaggataaaggttctagaaccattaggaacaagggtcccatcttcacacaagttacttaactgctgggaggctctatttcatcttatgtaaactacagataatacctactcacctcaagggtgtatcaagggtttatgtaagctaaatttgtagaaagcagttagcacagtgccaggaagggtccaagaagaaatggtacttactatgatatatttgtaggtatatatgtatgcatgttaatgagttcttattagctgtgttcattaaaggttttctctatcctgtgatttgcttttagattttggaatacattttattgtacacattccatttgtattattaatataacaacatttattactattattattatcatcaattcaatcacatctattgtatccttgatgatgaccatgattcctttaataatcataaaactctattcccttcatcacggggtaaataacctatcacaatgctgtaagtctccatcagcaccccaggctgcccctgctcacttaccagatctgctacttcagccagatcaatcatcatgttaatgtcacacccacattcaataatggtgagtcggagctttttacctataagtgaaaagatgaaaattttactttaaaaagaccctgaaaaaactctaagcatcaactctaactttcattttttacctgtatccagtaaaacaccatatacgtttacaggagtgtacgagaagttcacatttaccggtaaaataaaataaattccatcctgtttttcttgctgtgttctaaatttaaataatatccaaagtctacccagatgaatacaagtgcttaaacagggaaaattctgactggacaggctccatgataaccatgatcctgctgttcagctgtaggccaatgtctttgcctctatcaaaacttcccatattcccactatcactaaaaacatcctcaaacattatccaacagaatattcataacgataatcatttctaaattaaggtaaaaagaaaacagtcaagaaaatatgggcagggcacagtggctcacgcctgtagtcccagcaccttgggaggccaaggcaggtggatcccttgagcccaggagttttgagaccagcctggccacatggggaaaccccatctctacaaaaacaaaaaagaaaggaaaaaaaaaagaaaaattagccaggcgtggtggcatccactactcaggaggctaaagtaggcggattgcttgagcctgggtggttgaggctacagtgagctgtaatcacgccagtgcattccagcctgtgccacagagtaagactgtctcaaaaaagaaaatatggatgctccaaagataaagaaaagcctcaatccaactatattattgcaataacaagagacttgagtgtacattggcattctaccactggaagtttgtttcatctttcctcaaacttggaaaggtcaccatctcccaaagcagacaaattctcacaggaaaaagagaaaacgcgcacttccactagcatgtggcttcataagggcaaggatgtgcatgcacctggcacataggaggtacgtgctgtctgttaaatgatatgttcacagtgaccaggcctgctaccctcttccaaggaacatgcttggcaaagccatagagcactcaggataagatatgtatcacatccttatctctgggaacttacccttttctgaagttatagctaacttagtaaagtataagagaggtaacatgatatgacaaaatttaacatgttccactcaagaaagcaacaaacacatgcatgtccctcagatgacaatagccacgccaactctgtgtctgtggcagcatctcctacctgacacgatcatcacagggcctctgatctcggtcaacttctgccgggtgaagttccgaatgaggcattgtatcaaagtgctctttccaactttggaggccccatcaccactaccactattggtgggggctctagtggagttcgatcaaccactggaatatgatgcttttttgtcttcaaatcctgagtcctattcattaaaaaaaagaaaaaagtaaactcactttcaaaatagagaaaaaggtatcaaccttataagtagaattttcttagtatacttatagatatgagtactttagtatattttatagagtacaacagacaatatataaatataatgaacttgtcaattattaacttaacttctcacccccatccaaataattgctgttggataaagatgtaacaagacgacttcaatagtatatagagttgaaaactgaacacaccttaaatctgactgttttatgggtgatttgaatagttttttaaaaaccaaaaggtaaataccaaggcagtgcatcataatggataagagcagaggctctggagttaaatttggctctcctacttactggttatattattggaggtaacttgttttcttgacctcagttttcttgtccataaaatgagggcaagaatgattcctactctggtaaggctgctggaaggatttagttgaataacgtttaaagtacactgctaagaatatcacaaggactcactaaataaagctatgttagtaataaatattgtaatttttgtattttatattacaactttgtaaaacgtatccagagggaaaaagcacacttatcaccatagaaacagtttaaagtttaggaggaaacaaattctataaattcttgtatcttgggcaagaaacaccaaccagtgtgcagatgctggaggcaaggcagcttctatagcaaagcctctcatgttttggtaaaagccacacagcatgcatctccatgtcctttggagctggactagacttgtgaatccaaatgtcacctgtgagaggctcctactatttaaaaagaatcaatggaagaagcatcagactgtagctaaacatacctgtgaaaggatcgagccatccacacagcagactgaaatgcaaaagctttgggatttctcttccaggcatcttcttcgtctcctagctggagatcctgcagatgccgcttctttttctttgcagctttgggtccactatttttctttctttgtttcttctggtccttagtctccatagtggctatttaccaataacaagtaattctaatctacaaggaagaaggttggggtaaggaggtgggagaagcattttacaatccaggcaatacccagggcaaaaacattaaattttatttatttctttatgaagagatgatatatttgttcactgaacaagggtagaaactgcttaaccctccccaatttcatttatctctgttatgctataaattagatgagttacctctgctaagggtacattttatggttaagttactttttattcatcttaagtgtcaacatcagcagtatccatttctgcaaggatggaaacattctatatctgtacttttcagccatttagccattagccacatgtggttacttaaaatgtacttagagaaactgaaaaaatgaatttttaattaattttattccaactctaaatagtcacatgtggctaccatactggacagctcagacctagatatcaactggactaatgaagtggtttcctaacttaaactaaaacttaaattttaataaaaaatttaaaatgcttttatgaacttccaacatgatcacagtattacttttagtacctgttgactctgcaaaactcctaaattacaactcttctacatacatttgaaaaatagcaatatctagaggccgggcacggtggctcacgcctgtaatcccagcactttgggaggccgaggcgggtggatcacgaggtcaggagatcgagaccatcctggctaacacggtgaaaccccgtctctactaaaaatataaaaaaaaaattagctgggcgtagtggcgggcgcctgtagtcccagctactcgggaggctgaggcaggagactggcgtgaaccccggaggcggagcttgcagcgagccaagattgcgccactgcattccagcctgggcgacagagcgagactccgtctcaaaaaaaaaaaaaaaaaaaaaaaaaaaaaaaaaaaaaaaaagaaagaaaaatagcaatatctgtatgtgtgagacatgactagttctagatgatgcctggagaccccatggacttacagagacccttccagtgatttctgaggtacctgggaatctgtggccaataaattggtaatcactgaattagtgagttttttaaggatatccagctgcataaaatctgacagcttgattggaaaaaagcggggcagggtgccatttcattcaattaaggtcctgtattcattccgtttagtaaatgtttgtgtctgtctatgatgtgctagccactgtgccagtaaatggatatagctatgatctgacttgcagaggaaatccaaactagtatcttccgtgccatgcaataagggctacattgcaaggctgcacagggtgctactggggcacagaagtgagtcagaggcttcccacagacacacacacgagcggaaacagaaagtctttatatatcaccatatgtcaaggaacactggccgggagttaggagagctgggcactaggaacgctttgaaaccgaacagctgtgtgatttccgaggttatgttgcttctctactatattttagttccgaacttgtactaatgtttctctcccttttcttcttggtgggaaaagcacaatttggggtcaacagattcggctcaggtctaagtcgccggccgggaccacgtcgccaggaaacgacgtctccccgacaccttccctccccgtccgggctctctgcagcaattcatcccgtcactctcccaacgaccccgggcacacctccggcagatgcgaaatatgctgctcctcaggaggaaagatgacccggaggaccgcgggaggaccttcccactcgcgatcttcccagtgccccaaagccagggaccccactgccgcctaccccagcccgcggcaccgaacttgctcacaactgtgactcctcaggtcggattggacaccaccggaaacggaaattcaccgtcgcgccgactctccggagggaaacaaaaaggcagaaaaaagagaccggcgcctggacgactttcaggggagagctggaagaaagactgtcaacagctgagtgcgggcgccggcgccgtctacgcagtgcgttccaccgggtccgtatccctcccgattccgccccaccccgccctcggaactcgctgcctcaactcctgcggtgggactccggagcagcgtacaccgcccttgccttagtcctccccaaggccagggcagctgtgcggcctggcgcgggttacttggtgtggtgcaaaaagccagaaggagacacatttggtcctggccaccccggagtcacccaaaccaaaaggtaaaaggaacataaaaaagccttctggaaagtgtaaaaaaattcattgcacagtgatttttgtcttgtgaaatcatagttactgttattagcagttttttaaacgttttatattcattttttatggtgttctgacatatgagctgcttcaagtgtttttggacatagcttgggtgtaaaatgtaaaaagtggatattttcaatttgtagctttcttttttgaaacttactgaagtttgttctaaatatatccccttctttctcacctaccccaacacatttttaaaaaaaacaccaccaaatatccattacagcattgatgtgagtgtagatgaagtaaaaactttggcttccctgatgacatacaagtgtgcagtggttggtaagtgatcgcctttcttgctacctaatgagaactctggggaaatatgtttactcacatggttactgttaagatgctatagaaatataccttatcagaactgattttttttaagttgtcctctttaagacctgcatcatttttcaattagtctaaattaatatatagcctttttttatgtgagggattttttttataggagcttattgaattttaagtctagatctttgttttcaattcctcaacatattctataaataagaccaaattatagtagaaggatagtaaataagctattatcttttagaagttgtaaagagcactgattaactctatattagagaccccgcccctgccttggctgcgcgggcccccgccaaagggcccatggtcggcgcagccgagctggcgagggcagcgcgggtcccccggaacgccccccgaggcgagcgctaacgaggtccggcaccatgtgctaggtcactcccagtgcaaggccacacttgggccatccgagcaacccctcctcacgtcaggggtcaccctccccaccacccattgccccaccatggccggagaccggctcccgaggaagatgatggacgccaagaagctggccagcctgctgcggggcgggcctagggtgcctggtcatctacagccgctccttcctggagtacaacagctggcatgtgctcagctccgtcaacatctgctgctccaagctggtgaagtgccggctgcagaagggcaaggtgaccattgcagagttcatctggctggccacacgcagccaaatggaggccactgagccacaggatatggtggtctatgaccagagcacacgggacgccagtgtgctggccgcagaccgcttcctctccatcctgctgagcaagctggacagctgcttcgacagcgtggccatcctcacggggggcttcgccaccttctcctcctgcttccccagcctctgccagggcaagcctgctgccctgctacccatgagcctctcccagccctgcctgcccgtgcctagcgtgagcctgaccctcatcctgcctcacctctacctgggctcgcagaaagacgttctgaacaaggatctgacgacacagaatggaataagctacgtcctcaatgccagcaactcctgccccaagcctgacttcatctgcgagagccgcttcatgcgggtccccatcaacgacaactactgtgaaaagctgctgccctggctggacaagtctatggagttcatctgtaaaggcaagctgtccagctgccaagtcatcgtccactgtctggtcggtatctcccactctgccaccatcgccatcgcctacatcatgaagaccatgggcatatcctccgacgacacctacaggttcatgaaggataggcgccagtccatctcgcccaacttcaacttcctgggccagctgctggagtaggagcgcagcctgaagctgctggccaccgtgcagggggatgcgggcaccccctcagggacgccggagcctccgcccagccctgcggctggggcccggctgccatggctgccaccacctacctcagaaagcgctgccaccgggagtgcagctgccagggagggcggcctgagcgcgggcggggagcccccactgccccccacgcccccagacacctgcgcgctgcagcagggctgcgcggcctgtactctcctctgaccgcctgcaggacaccaaccgcctcaagcgctccttctcgctgtacatcaaatcagcgaacacccccggccggcggcccaacggccccgggtcacccgaccccggcgaggtcccaaagctctgcaagctgcacggcccgtcggagccacgctgagcctaccttcgcccagccccgacagcccggatgccgcgcgcccacggccctgcgggcggcccaggcccccagccggctccccgctcccccgcgcacagcctcggcctctcggccctgtcggcgcccaggctgcccggccctggccagccggccccggagtctgggcgccaccgcttgactccccgggcacgccgtcgcccgacgggccctagtgcttcagccccgagggcgcgcagggggcgggcggggtgctgttcgcgccctttggccaggcgggcgccccgagacggggcggcggcagcgacctgcggcggccggaggcagcaagggctgagccccgggacgcgcggaccaactggcccgacgagccgccccggagacggagacgcagatcaagcgctgcagctgccagatggagttcgaggagggcatcctggaggggcgcactcgcggcgaggagctggccgccatgggcaagcaggcgagcttctcgggcagcgtggaggtcatcgagatgtcctgacccctccgctgcccttagctccgctgcccacagccagacccgttataaatatatattatatataatgcaaagaaaggtaaatggttttacttttatttttattgagaagtaaatatttctattttttatttatttaagctattcattctggcaatgatttggcaacagtgcaggtggtcctcgagctctatttttactgtctggtatttaaactgaaacatacctttctaagcaatacgaggccaccttcagtcgcaaggtgggtgccaggcctggtgcccctcccagttcccccaccccaggaaacactgctgacacttgcaaaggctgccgagcttttgtgcactttttacataagaaaaaggattaaaaaaggaaaaaaaaaaagcttatttgccacaaacagccgcggacccccccccccaccttcttcctcccttcaggctctgccccaaagccataggttgggggagcaggagctggtgtgccagagagatgcggccagccctccaccagctccaggcaccaaatcttggtggcagggagggcaccccgctgcccgttgccccagagctgttccttctcaagggaggacaggcattgggccccatggtgccaggacgttgagaggggctgaggaatagaacagagtgtgtaggggcttggggcagggggttctggagcgtcagatgaggtggagcccaggggaggatgggggtgttgttaatgtccccaactcctgccagagccccagtccagccactggtggctcagaaaggccattcccagagggctgcggccctcccttctcctttgaccctgcccccagaactacctgccaggcaggacggcaccagtgcaggagaggagcttggcctccgggggtgacgcaggagtggggcctggctagcctgtgctggctccactgggcggggagccctggaccgccaggtatgcggagggggtgggcttagggtcctgttccaggtccgtcccccacctagcaagtccccaggcaggacttggaaaccaggtgtgcaccagcaggctaaggggctccaagagcaggtgctgcttcgcacaggaagttcaggcgccagccaagtccctgtgcttctggggtaggcctgcttcacttagggagcgctgccctcaaggcagataaagccctctcctttgccccgacctgcatgggggcttctcaggagagaaactcccgtgtgcccctttcccagggcactctctctagacagcatgccggcccccaaacacaggtggcttttgggcccaggtgggtcagcctgctgcccctggcccataccctctcaggccattgggacccctgcccttcagatgttctagggtctaggagtggaccagtcaccctgggaagaggccagggccttggcaggaggggtggcccaggcaggacccagtcctgagtcctggagcaaggccagggaggcgcccaccccaccccggccagctgccctctctgctgtttgttctatttgttcttcttttcacccatagccttgtgttcctgtcatccctcctttcagcaaaagtccttttcccattccctctgtccccaccaactgctgttccccaagaaaataagctatcattgtatttgcaatctatggattagaggttgaagtatttattattattggttaattattattaattatataaaatatatatattagaacttggctagccaattttattgaacaatttctgttcaataaaatgttgtttaaagtacagtttagaaaactatggtaggtttatttcttgaactttcagaaattcaagcttaaagcatcacacgtttttctaatattgtgtggcattttctgtcattttacttttttaacctttatatggaataacaaccatcagccttgtctttcagatgtgccatttgggggtgctaaagctggtgttaagatcaatcccaagaactatactgtaaatatgagagtgatacttgtttttttttgttgttgtttttgtttttctgagacagagtcttgctctgtcgcccaggctggagtgcaatggtgcaatctcggctcactgcaacttccgtctcccggattcaagcgattctccttgattcagtaactaggattacaggtgcatgccaccatgcccaactaatttttgtatttttagtaggggaggcggtatcagcatgttggccaggctggtcttgaactcctgacctcaggtgatctgcccgccttggcctcccagagtgctgggattacaggcatgagccaccgcacccggcctcaaagtgatatttgtgcacacagtgcatttatgaaggacttgaaattactgggcttctctgtatcccccatatcagtgagatcaatggtccccattgcttttcaaatggaatgaaaaaagtaaagaattaactcattgagtgttttgccatataaaggtcacctacttaatatctatatcctttatcattttgttttgtttggttttgtttttatgagtcttgtattatttttttgctttttgtattattatgttcttacttattaaaaaggtaattaatattttcatattgttagacacttaaacccatatttaagaattactgtgatctaattaatcaggcgtagtggtgcgcacctgtaatcccagctacttgggaggctcaggcatgagaattgcttgaactcaggaggcagaggttgcagtgagccgagatttcactgctgtactccaccctcggcaacagagaaagactctgtctcaaaaagaaaaaaagtattactgtgatctgaagtttttaagtcaggatttcattctagacaaatatcttaactaagcctataaaaaccttactttttatcctgtcagttccaagcaaattcaaactggttgtcacaatgctttacataatactaaattatctgtatacaaacataaacgcgtatgatttttattctctttaaaattcaccatttacatggaatataattatatttcaattaatcttaattaagatttagtaggccaggcgtggtggctcacgcctgtaatcccagcactttgggaggccaaggcgggcagatcacgaggtcaggagatcgagaccatcctggctaacatggtgaaaccccgtctgtactaaaaaatacaaaaaaaaaaaagtacctgggtgtggtggcgggcacctgtagtcccagctgctcgggaggctgaggcaagagaatggcgtgaacccgggaggcggagcttgcagtgagccgagatcgcgccactgcactccagcctgggcgagagagcaagactccatctcaaaaaaaaaaaaaaaaaaaaagacttagtatatttttcagtggggaattaatagaatgggaatttgagtcctagttctactatcctgtttttataatctacttttttgatcccttatttcctcacctttaaaatggcaatgcctactttatgagttgttctaaggattacaagagaagacatatgagaatgtactataaatagaaaataagatgctagctataatctcaagcgatttttatatcttatttttattgttttcttattttacaggataatgaattggaaaagatcacaaggaggttcaccatggagctagcaaagaagggctttattgtgtggccacatagattttggtataaagtgggaacatctaaaaaaatcttttttttttttttttgagacagagtcttgctctgtcgccaagattggagtgtagtggtgcgatctcctccacctcccgggttcaagcaattctcttgtctaagcctcccgagtagctgagactataggcatgtgccaccatgcccagctaattttcgtatttttatagagatggggttttgccatgttgatcaggctggtcttgaactcttgacctcaggtgatccacccatctcagaatcccaaagtgctgggattacaggcgtgagccactatgcccggcctcctactatttgtaataggagatagggtcagataagggaataaaagcaggctgccccagccaggggcagcaaccagctcaggtccccttccacactgtggaggctttgtttttttgcgctttgcaataaatcttgctgctgctcactctttgggtccgcactgcctttatgagctctaacactcatcgcgaaggtctgcagcttcattcttgaagtcagtgagacgaagaacccaccaattccggacacagaagtgtcttcatttaaaaaaattttttaagtgcactgaaaaagcatcacatattctagcctcgtaataatgctccctttttggagatcccaggaatcagtgtgggctctgcccagagctcagagatctagtaaaaagacagatagttcctatataaataaaattggtctcctcatataatcctatgatagatttttttttttttttttttttggagacagagttttcgctcttgctgcccaggctgggtgatcttggctcactgcaacctgcacctcccgggttcaagtgattctcctgccttagtctcctgagtagctaggactacaggcacccaccactgcaccaggctaatttttgtatttttagtagagacggggtttcaccatgttgggcaggatggtcttgatctcctgacctcataatctgcctgcctcagcctctcaaagtgctgggatttgggattacaggcatgagccaccgtgcctggctatcctatgatagatttctaaaatgttatgtttgatttggcatccttttttttgtgtttttttttttttttttgagatggagacacactctgtcactcagcctggagtgcagtggcacaatctcggctcactgaaacctctgcctcccaggttcaagcaattctctcacctcagcctcccaaatagccagaattacagacatgtgccaccacacctggctaacttttgtatttttagtagaaaagggttttcaccatgttggccaggctggttttgaacttctgacctcaggtgatccacctgcttccaccttctaaagtgctgggattacaagtttgagccactgcgcctggtgtggtatgtggttttactgcatgtgactagtttacatgcaactagccatgcaagttcagtaacccaaggcggtctataccctgttcaacaagaaccatctactgatgacacttctggaagtctgggcaatatcaacttgctgtaagagttcccaaatgctctcaattatcaggtgataacaaagttttcaaaccagtaaattttgagtagccctttactaggaataatcttgaataagttagtattgccctccacaaccacaatttaaaaaatatccgtattggttttctcttcaattcaagcatcatgtaaatatgtaatgtagaaaatgaggatttcccatattcccatagaatcacaaagatgatcactggtaatatgtgtgctacatatatgataccaggtttattcttttttttttttttgtctttttttttttttctgtcacccaggctaacatccagtggcacgaacttggctcattgtatcctctgcctcccgggttcaaacaattctcccacctcagcctcccaagtacctggaattacaggcacctgccaccatgcccacccagctaaatttttttgtattttcagtagagacgaagtttcactaagttgaccaagttggtctcgaactcctgacctctggtgattcacccaccttggcctccaaaaatgctgggattaaaagcatgagccactatgcctggccatttttttgtactcttatacaattatatacttgctttataaaaatgaacttattctacatatatatgttattacattattaggacatgttccctaatgacatattacattttcatcacttttttaaaatatttttttcctgagacagcatctcactctgttgcccagacgggagtgcagtggcctaatgacaggtcactgcagcctcaagctcctcggttcaagggatcctcccatcttggcctcctgactaacccagctaagtttaaaaaaaatttttttttttggcctggcgcagcagctcacacctataatctcagcactttggaaggccaaggcaggcagatcacttggggtcaggagtttgagaccatcctggccaacatggtaaaactccgtctctactaaaaatacaaaaattagctgggcatgatggcaggtgcctgtaatcccagttacttgagaggctgaggcaggagaatcacttgagcccaagaggtggagggtgcagtgagtcaagatcatgccactgaaatccagcctgggtgacagagcaagaccctgactcaaaaataaataaataataactataacttttttttttcttttttggagaaacaagtctcattatgtttttgaactcctggactcaagcaatcctcccatctcagttcccaaagtgctgggattacaggtgtgaggcactatgcccagacattttcatcattctttctttttgagatggagttttgcacttgttgcccaggctagggtgttacgtcacgatcccggctcactgcaacatccgcctcccaggttcacgtgactctcctgcctcagcctcctgagtagctgggattacaggcatgagccaccacgctcggctaattttgtatttttagaagacatggggtttctccatgttggtcaggctggtctcaaactcccgacctcaggttatctgcccacctcggcctaccaaagtgctgggattacaggcgtgagccaccgtgcccaacccattttcatcattcctagtagccatggagcattccctttaatcaactgtacatgaaatttttttttctgggggcaaggggctcatattcacacagatgggagtccagttggtgagaaggtggcaggcggcacagccaccttatacagcatgccatactggtccactgtcagaccggtgatggccacagctccatcaccccgaggcggactctggctctgcccagccaccacaacccctggggaccattcagaggcatcactggagggtgtgtggttagtggagcagctggttgtggggaggtctcgtttctttggtggaaggcattcctgactcctctcatgaacaggtttcatattgctttgtggtgttcctggagcctggaaggagttggcttgctccctggggcatcaggaggggcttctcggtagtttccctgtacccctctaggtttctggctggggcgcccacatctgagcttccagcagtgcttctgagcagctgtagtaagcgtcctcccggctggctcgggagctcacagcgcttcccgggatccacttgctcgtcctggagctgccgcaactgtggccgtcccatccctggccctggagccgccccataccccttttgagagtgagactctcaaaaaacaaaaaaaagaaagaaactatgaactatggtccgggcatggtggcttatgcctgtaatcccagcactttggaaggccaaggcgggcagattgcttgagcccaggagtttgagaccagcctgggtaacatggtgaaaccccatctctacaaaaatacaaaacttagttagctaagagtggtggcacatgcctgtagtcccagctactagggaggctgagtggggaggatcacttgagcctgggaggcagagggtgaagtgagccaagatcatgctactgcactccagcctgggtgacagagaccttgtctcaaatagaaaaaaaaaaaggtggggggagggggaagaaagaaactgaatctaggatctaccacttatcaggggtgcaaccttttttttaagatggagtgttgccctgtgtcccaggctggagtgcagtggtgcaatcttggttcactgcaacctccgtcccctgggttcaagcgattctccttcctcagcctcctgagtagttgggattacaggcatgtgccacgacatccagctaatttttgtatttttagcagagacagggttggccaggctgctctcaaactcctgacttcaggtgatccgcctgtctcggcctcccaaagtgctaggattacaggcatgagccaccatgcccggccctagtgggtgcaaccttaagcaagacagaggatatttactttcctatatcgatatgagtcaagtgggatgaatcatgtgaaaatgcttagcagaggaccagtttaggtcaggtgctcaacatatcttagttgaatttggcaaattattcatctagactagtggttctcaatcagcaatggaatcacctggagggccttaaaccatagcttgctgggccccacctccagaatttctggctcttatctatgtaaagcgggtctgaaatttgcatttcaagcaagtttccaggtgttactgatactgctgatctgaggatcacacttaaccactgactataaactgataggtcaggtgtggtggcttcacacctgtaatctcagcaatttggaaggctaaggtgggaggaatttgagaccaccctgggcaacacagggagacctcacctctacaaaaaattagccagatgtgggggcacatacctgtagccctagctactcaactacccagctactcctactgaggtaggaggaccacttgagcccagcctgagcaacatagcaaaatcgtctctaaaacaaaacaggctgggcgcagtggctcacacctgtaatcccagcactttgggaggccaaggggggcggatcacaacgtcaggagatcaagaccatcctggccaatatagtgaaaccctgtctataccaaacatacaaagattagctggggtggtggcgcatgcctgtaatcccagctactcgggagtctgaggcataagaatcgcttgaaaccaggaggcggaagttgcagtgagccaagattgggccactgcactccggcctggagacagagcaagactgtcacaaaacaaaacagaggacaagaacaatctgcttgtttagtaaagcatgctcaatgcctaatatatagtttccagcacagcctaaagtgcaaatttttcagtgaataaaccactctgtgcctcagaataactgatatttactgtcaataatatgagaacaaacacttttgttcactgctctatttccagacccaagaacatggcttggcacacaatgtcagcgctcagtgggttcaccctgcctgctgccttgacaaagctgatttatcaagaccagggaattgcaatggagaaagagtaattcacgcagagccagctgtgtgggagaccagagttttattattacacaaattagtctccctgagcatttgaggatcagagttcttaaagataatttggcgagtaggagcttgggaagcggggagtgctgattggtcaggttgaagacggaatcacagggagtcaaagtgaggttttcttgctgttttctgttcctgggtggaatggcagaactgattgagccaggttactggtctaggtagtcagctgatccaatgagtgcagggtctgcaaaacatctcaagcactaatcttaggttttacaatagttatgttattcctaaaagcaatttggggaggttcagactcttggagcgagaggctgcatgtcccctaaactgtaatttgtaatcttgtagctaatttgttagtcctgtaaagacagactggtccccaggcaagaagggggtcttttcgggaaggggctattatcaattttgtttcaaaccataaactgaattcctccccaaagttagttccacctacacccaggaatgaataaggacagcttaaaggttagaagcaagatggagtcggttaagtctgatttcttccactatcataatttcctcagttgtaattttgcaaaggcagtttcaacagcagtgctcgaaaaattatgaaatcaacaaatagtactgaaaagttcaaatgaagtcatatatgaaaaagaaatcctagcactgttagctataattacttagccattaaatggggtactaataattactgcaggaactatcttttccaacagagcgcagagatcttttggctctgataaagctctgcacctaaacaaaggcgctgtataaaaatggttaataacaattgacctttactgagtgcttactatgatgccaagcggcctatgtggcctaatttcatcctctgggcattattatttccattttacaagctgtagagccagacctcagacccccacatgcaggttgacaacagttggtgccctttaccaccaccacacgttccgcaaatctcataaccagcaaacgccatgggtgagagcaacctagcggacggaaatcaacggggtcaggggtcaccaggaagtgactacaagactctagctcagaggtcactaatacgtcacaggcagagtgaaggggcattattaaagatagtttgacaaattctttttaatctcatttctgttggtgaggccataaagtgactggaacatctgaaaaaaaatgtcaggagggaaatacatacgactcagcagaggcgcacaggcggcggccatgatgggaagatgaaagaggcgcatgcgcggcatccgggtccccgaaatgcagacgtggcagaagaagtggcccggccctaaagcgtggaggaggaacttccgggggtgacgggacggccccctcggaaccggaagtggagcctgggagccttgacgttaggaacgaagtctaacctggatctggagccgggtgaggagtggcatcgggaggttggcgggtaggaaagcaaaggagaggtcagggtattactggccagattggggtccggtttcagaaagaagggaggagcctgggggcggggcctgggtagagaccctcacctcacgcatccaccatccaggagcaggtcctagaccatcccttcgtctcccggcccagattccggctcctgcttcctgccccgagcctgttaaaaggtgcaagacgtttggtctctgtgcttaacagagcagccccctctcttaacgtggccctagaagccgacttggcttctcggttttgatcctcggctctccgaggctccatggcttgactactttcagagttctaggaagcttgccccgcccccttgggttgtcaccctcgactatccacccagaatggagtcgagacttcagtctgactccaagctcttgaatgtgtttgaggggattattttctggagaagaagctcctttctttacccctccccccggctttggaaacataaagggagaggacatattttaaacttagtgtcagtgacctacctctgtaaggtttagggtttggaagaacagctattgagataactttgagtttaaagagttttagaccaggatcagctccttttctatagtcaaggtggcccttctagcaaagggggagaggtccattgttccctttgcagcaactctgagtgctcctgctttctgggccccttctgtctacaggataattggaatgatacagctgttgaaagtagatgtgatgagatagttttcttggaaggaccctgtttagaaaaggccctctaattcatccctgtgttgatgagcaagattgtaataattttgatggtggctgagattcataacaatcgtaaggggagcagaaacaggagagttggagaagtgcattggaatttagaatattcatagtcttctgcttgagggatgaggtgaatgatttttttccatgaaatctaactctaactttgcccctgattcttgaactgtttcctcagattatgtgaagaagttttggtgcctgttctgcacttggttttaatctgttaccttgctagagttttcaggtgtcctttattttttatttttttgaaagggcgtcttgctctattgctcaggctggagtgcagtggcacgatctcggcttattgcaatctccgcctcccgggttcaagcgatttctcctgcctcagcctcccaagtagctgggattacaggcgtgtgccaccatgcccggctagtttttgtatttttagtagagactgggtttcaccgtgttggccaggctggtcatgaactcctgacctcaagtgatctgcccgacttggccttccaaagtgctgggattacaggcatgagccactgtgcctggccaacttttattgattttaatgcttcggttttggccgggcgtggtggctcacacctgtgatcccagcactttgggaggccaaggtgggtggatcacgaggtcaggagatcgagaccagcctggctaacagggtgaaaacctgtctctactaaaaatacaaaaactagctgggtgtggtggcacgcgcctgtaatcccagctactcgggaggctgaggcaggagaatcgtttgaacccaggaggtgaaggttgcagtgagccgagatcgcgccactgcactccagcctggcaacagagtgagactccgtctcaaaaaaaaaaaaaaaaaaaaaaaaccttcagttttaaggtccatacactcttttggtggaaagacttgggttggagtatcatttgtattatggcagtttagctaaagaatgtcatttctgtaactcagcctaaattttgtcattgagggggaaggattttagcagatctgttttagatttttagcctgattgattttaaatcaattgttcagcacactagagggtactcgatgtttgctgaatgaatggatgctagagtgaatgaatggaaagtgggaacattgtttctttcacctgtaacatcaaggtagttcatcagccacaagactgtgtgactagacactagaaatcataccactggggaatggaggctgctgctccatttcagtggatctgtctgaagttgaaatttatactatttagacagtgacaaagggtggatggtcagaataacaaaatccttgcttttaggagataatctgaatgctggctggggcagaaaattactaagatcctgtggaagtgtgaggattattaaactgatcactgtctgataaggtcaatttctttttatctctacttcctgccctgaatagttgctctctttagaaagttcattttgactaatttctcctctctctcacaggtgagatcaaattgggaatgctttcataatgaacgtcaaccagtcagttccacctgtgccaccatttgggcagccccagcccatctacccagggtatcatcagtccagctatggtgggcaatcagggtccacagcccccgccattccctatggagcctacaatggcccagtaccaggctatcagcaaacacctccccaaggtatgtttctgtttctgtttcctttgagctagggagggaaatcagcagagtcttcaggttgggttgtattgctctagctaagctacctgagaagtttggataactgggattgaggaacataaatctggccctgtgtagctgagagccccgtgggcgcccttcccttccctttttttattattattttaatttttttttgagacagttttgctctgtcactcatgctggattacagtggcatgatctcaactcattgcaacctctgcctcctgggcttaagcacttctcctgcctcagcctccccagtagctgggattacaggcatgcaccaccacgtccagctaatttttgtatttttttaatttattttgagatagagtctctctctgtcgcccaggctggagtgcagtggcaccctcttggctgcaacctccaccttccaggttcaagcagttctctgcctcagcctcctgagtagctaggattacaggcatccaccaccacaccagctaatttttttgtctttttagtagagatgggggtttcaccatcttggccaggctggtcttgaactcctgaccttgtgatctgcccgcctcagcctcccaaagtgctgggattataggcgtgagctaccgtgcctggcctgtatttttttttttttttttttttgagacagagttttactcttgttgcccaggctgtagtgcagtggcacgatctcggctcaccacaacctccatctcctgggttcaagtgattctcctgcctcagcctcccgaataactgggattacaggcatgcaccaccataccctgctaattttgtatctttagtagagatggggtttctccatgttggtcaggctggtcttgaactcccaacctcaagtgatccacccacctcggactcccaaaatgctgagattacaggcgtgagccaccacacctggccactgtttgtatttttagtagagatggggttttaccagtggccaggaaggtcttgaagaactgctgacctcaaatgatccaccagccttggcctcccaaaatgctgggattacaggcttcagccaccacgcccggccccttccctgtttttttattttattttacttattttattatttatttatttatttattttttgagacagtctcgctctgttgcccaggctggagtgcagtggcacaatctcggctcactgcaacctccgcctcccagattcaagcaattctcctgcctcagcctccagagtagctgtgattacaggctcccgccaccatgcccggcattttttgtatttttagtagagacagtgttacaccatgttggccaggctggtctcgaactcctgacctcaaatgattcacccatctcggcttcccaaagtgctgacattacaggcatgagccaccacctctggccttatttttaatattttttgagatggaattttgctcttgttacccaggctggagtgcaatggcacaatctcagcttactgtaacctccgcctcccaggttcaagtgattctcctgcctcagcctcccaagtagctgggattacaggcatgtgccaccacacccggctaatgttttgtatttttattagagatggggtttcaccatgttggccaggctggtctcaaactcctggcctcaggtgatccacccgcctcagcctcccaaatgctgggattacaggtgtgagccaccgtacctggccttattttttttcttttttatttttgagctggagtttggctcttgttacccaggctggagtgcaatggcacaatctcagctcactgcaacctctgcctcccaggttcaagtgattctcgtgcctcagcctcctgagtagctgggatacaggcacccaccaccacacctggctaattttttgtatttttagtagagatgggattttgccatgttggccaggctggtctcgaactcctgacctcaggtgatccacttgcctcggcctctcaaagtgctaggattacaaacgtaagccaccacgcccagctgtcttccctgtttttagataaggtactgtgtttctgccttaagccatctagtgggaacacatctcccaggttcactgactgttcacttcctgtgggtatcaccttgtgcagccttacctggtcacattgttcagagctaaatggaagggttgtggtccacacccctctagatcctgtgaccaggaccgaatatttcctgttgacttgtagtctccttgaaataatttattcgtcatatatgttgagaaagcctcttgttggactgatgattcttatgtatgaatgaccctgggacagtgtagtttatgggggtgaaaagtgtgatatttgtgtgcctgacttttggtgcgtctcatgtcttctgatatccatccttttcctttgcttgagtttcctctgcttcttagatgctctgtaatgtcatggtaataagataatactaatctgatgctgttctaggttcagtgtttggcttttaaccttaccttttctttttctttttttttttttttctttttggagacagagtcttactctgtcacccaggctggagtgcagtggcacgatcttggctcattgtaacctctgtctcccgggttcaagcagttctcctgtctcagcctcccgaatagctgggattacaggcacatgccaccacgcccggctaatttttatatttttagtagagacagggtttcaccatgttggccaggctggtctcgaactcctgacttcgtgatccacctgccttggcctcccaaagtgctgggattacaggcgtgagccaccacgtccagccttaccttactttctcaagaagagcagctagtactctaccgattctccagaggggctttttggaaatagttaacagtagatctttgcttaggctagccgatgatttagggtatgccaaactctatgctttcataaagagatatggaaaaaagaaggcatcaaggaggtactggtaagatttgggaaataatgaagtatgatgattttaactgtggggaaaaaatattgtgatgagattaggccccaggtctttggaagaaccttaattctaagctgagactttggctggacagagtccacctctgctttgtcaagtgctcgagtttggcattctctcatgagaaagctttgttagaggaaaacatatctgattctgtcatggttggtgagcaagtttaggctaatcatgttcctgtaggcaggttctataatgtctaatctctactgagggcagagcaaaagaaaagcattctttgaacagaggtcatccacatttcaaaagtgatgtgccaagtaactaattgctttctccctgaacttcatatgtgaagaatggctaagggtagtgtaagtagctttggtggtggttctaaggaataggaaggatggagtacagcttttgtgaggacataggtggcaatgctgatgggaggacaggccagctgtccttactgaactgttgggcagaaacaaggtctccgatctataggaacacgttcctgaatcgtgctgtttcatgttttcacacttagaagtggatgaaaggatatagttagtgtaagcagaatgaatgaagaagaaggtggcagaataatctccccaagagatgcctttctttgcagcctagttccgtatattacttggtcatcttctgagtctcctttttcatatatgctccaagtttctgagttctggagtaagatcttttccttaaaagggttggcttgttgtctagggtaagaatatcaggcagtcttggattgactgagagtatggtgatcaaaggaaggccctacattcttgtgcctctggctacagcttcacccctagtatgcttgtctaggggagtgtaggccccttgttgggaatctgtgtttagaatactgctgtagctacagttgtatgctggtagtgtccttttcactgcctaaactgtggtattgggccagtgaaggtctgagtttattgatccttgctttgcattcctggctcagggtggaggagaaagttatttcccaatcacttagtttctgtcctttaccctcaggtatgtcaagagccccaccttcctcgggggcacctccagcctcaacagcacaggctccttgtggccaggctgcatatggccagtttggccaaggagatgtacagaatgggccaagctccactgttcagatgcaaaggtaggtacttggtcaatctaaaattggtctgatgaggctgagtgcagtggctcatgcctgtaatcccagcactttgggaggctgaggtgggtggatcacctgaggtcaggagtttgagaccagcctggccaacatggcaaaaccccatctcttttctcaaataaaaaattagccaggtgtggtggtgtgcacttgaaatcccagacttgggaggctgaggcagaagaatcatgaggcagaggttgccgtgagccgagatcgtgccattgcactccagcctgggcgatagagtgagactccgtctcataaataaataaataaataaataaataaaattgatctgatgaaagtagaaaggttaggaatgtatgggggtttgtgttttgttttgttttttttctctcctttgcctttcttgtagatcactttttctcttccctctacccttttgtactttgtcttcttttttccaggttacaggtactgctgacgtccagccctgtggattattgacccatcttagtacctgggttcctttgcatattcttcattttctgtgaacttgagtttcttgctttactagacatacatcttcaataatggttgcagtcctgttgagactaccctaagggagaaatgggaagaggaaacttcaggattatttgcatctcttttgacttgcccctttcctctagaacaggcacttagtaggactgattggttaagtttgggcatggccagttatgaactgaaagatactaaaagggaaaccacataaatggtgaaaacttcagtggtacagtgacccaataaacccatcttagcatgaaagtccattaaaggagggcagtcatctctattagagtgctttttaaaattttttaatttttttttttgagacagggtctcactccgtggcccaagctagagtgcagtggcaggatcacaactccctggagcctggatgtctcaggctcaggtgaccctcccacctcagtttcccaggtagctgggactacaggcatgcgccaccacacccagctaattttttgtatttttagtagagatggggtttcgctgtgttgcccaggctgatctcaaaactcctgagctcaagcaatctgcccaccttggcctcccaaagtgctaggattacaggagtgagccactgcacctggtcaggagtgttgtttgtgtttggtaaataaagagtaaaatataactgtgggaaaggggtatgataatagaaaagtcactttctgacactttaactgggtgtccagaacacacattttaagcattgaatgtaagcctgggtaagtcaaacaagtggggtacatagaagataacaagtacacaaatgtacataaagttataaaacagggtgaggatatagtgagggggtagggagctgttttaaatacattggtccgtgctgggtgcagtggctgactcctttaataccagcacttggggaggctgaggtgggaggattgcttgagctcacaagttgaaggctgcagtgagccatgattgtactgctgcactccagtctaggtgacaaagcaagaccctgtcacaaaaaaacaaaacaaaacaaaaaacccatacgaaacaagcatatgccttagtaaattattatatagcaaactcctttgtaactacaactacgacccagatgaagaaatagaactttgccactcaccccaaaagccttttccatgtgccccaattcaaacattattctctccctcccctcataaataacaactatcctgcattatcctgactcttacagtaattactttctttttctttttttttgagacagagtcctgccctgttgcccatgctagaatgcagtggtgtgatctcggttcactacactctccagctcctgggttcaggcgattctccagcctcagcctcccgagtagctgggattgcaggcgcctgccatcaggcatggctaatttttttatatttttagtagagacagggtttcgccatgttggacaggctggtctcgaactcctgacctcaagtgatccacccgcctcagccttccaaagtgctgggattacaggtgtgagccaccacgcccagctgactttcttgtggttttttaaaaatagtttacacttggctgggtgaggtggctcatgcctataatcccagcactttgggaggccaaggtgagaagattgcttcagcccagatttttgagaccagcctgtgcaatatagggagaccccaatctctacaaaaaataaaatgttagctgggcatggtggcaagcttgttgtcctagctactttgggaggctgaagtggaggtatcgtttgggcccaaaaggtcgaggctacactgagtgtgatctcgccactgcactccagagcttgagaaacagcgagactgtgtctcacaaagaaaaagtttacactcaaatgtacaaccccacgtaccacaatttagttttacccacaggaaaaacacttggtgtgtcttaagtctataagctccacctctgtcttctttttcttagtatttatctgttgaagaaaacagttaacccaaagaatttcccacagtttggactctttacataacatttacatcacacttgtccaacttgtggcccacagtctgcgtgccccaggacggctttgaatgtggtccaacacaaattcataaacttccttaaaacattatgaggtttttttttttaagttcattacctgtcattagtgtagtgttagtgtattttatgtgtggcccaagacacttcttccagtatagcccagggaagccaaaagattggacacccctgatttacattgtattaggtattataagtaatctagagatgatttaaagtacatgggaggaggctgggtgtggtggcttatacctgtaattccagcactttgggaggccaaggtgggtggatcacctgaggtaaggagtttgagaccagcctggctaacatggtgaaaccccatctctactaaaaatacaaaaattagctgggtgtggtggcgggcacctataatctcagctacttgggaggctgaggcaggagaatcgcttgaacccaggaggcagaggttgcagtgagccaagattgtgccactgcactccatcctgggcgacagagtgagacttcgtctcaggaaaaaaaaagtatatgggaggttatatgcaaatatgatgccgtataacccacatccaattctattgattccaccttcaagatgtatcccaaatctcactacagtcattcctcagtatccatgggggaatggttccaggacctcccctgaccaacagataccaaaatccacaaaggctcaagtccctcatataaactctattcaagtagagatgttaggtaggcaggtgcatatacaaatctgcagctcaagactgatgctaggactggagataaaaatttgggagtcctcagtctatagatatttaaagccgtgggactagatgaaatcatttaaaaagtgagtattgagattaaagaatggaattgaggactgagacttggagcttagcaacatttaaaagtaaagaggagccgccattaaaagacaatgaggggccaggtgcagtgcctcactcctgtaatcccagcactttgggaggctgaggcaggcagattgcttgagctcaggagttcgagacaagcctgggcaacatggtgaaaccctgtctctaccaaaatactaaaattagccgggtgtggtggcacatgcctgtggtcccagcttcttgggaggctgaggtgggaggatggcttgaaaccaagaggcggaggttgcagtgagccgaaatcgcaccgctgcactccaacctgaatgacagagtaagaccccatctcaaacaaacaaaaaaaaaacaaaagacaatgagaaagagcagtagtgaggtgggagataagccgggagagtgtggtgtcctgaagtcaggtgaagagagtatttcaagaaggtgagagagtaatcagttgtgtcagatgctgccaaattgtaagatgaagatggagaattgaccattgaatttggcaaggttggcgtcattggtaaaggcagtttcagtgtagagataaagaaaactacccagttggagtgagtcagagtttcaggccaggcgcggtggctcatgcctgtaattccagcactttgggaggccgaggcgggtggattacaaggtcaggagatcgagaccatcctggctaacacggtgaaaccccgtctctactaaaaatacaaaaaattagctgggcgcggtggcaggctcctatagtcacagctacttggggggctgaggcaggagaatggcgtgaacccaggaggcagagcttgcagtgagccgagatcttgccactgcactccagcctgggcgacagacagcgagactccgtctcaggaaaaaaaaaaagtttcaaccgggtggtagattgacataatctgaaaaccctctgctaccaaagtctagaaaggagagagaaaatagaaacaaaaaaaatttttaagtgcaaagttaagcttgaaagaaaatgtgaaattcttaagttttagagaccaagtgaggactgaaaatctttttttttttttaaatacagagtcttgctctgtcgcccaggctggagtgcagtggcacgatctctgctcactgcaacctctacctcccaggttcaagcgattcccctgcctcagcctcccaagtagctgggactacagatgtgggccaccatgcccggctaatttttgtatttttagtagagatgaggtttcaccgtgttggccaggctggtctcaaactcctcgcctcaggtgaaccgcccaccttggcctcccaaagtggtgggattacaggcatgggccactgtgcctggccatcaagtgaggactgaaaatcagagtggtaaattgactctggagctgcctgtagattgggtggattcatcatcttgagaagccagggccttaaatttaagcaggtactggggaaggcagatgagtccttgggctttcctgagagtagttttggaactgagacattgtttataaagtctggacctgggctgcaccttcattgaacaagctgactaggggaaaaaagtctgcacgctggaaaggggagataaggagtgctgtttctctcaggctggctgtggatgggtgaaaaaaaaagttcttgggactgcaaatggacatgacatctttttggaatgatgaaaatgttttaaaatttgattctggtgatggttgcataactaaatttactaaaaatcattgaattgttcacttgaagtgaatttaatggtatggaaattacatctcagtaatatttttttttttttgagacagagttttggtcttattgcccaggttggagtgcaatagcacgatctcagctcactgcagcctctgcctcctgggttcaagtgattctcctgcctcagcctcccaagtagctgggattccaggcatgaccaccatgccaggctaattttttgtatttttagtagagacagggtttcaccatgttggccaggctggtcttgaactgacctcaagtgattcacctgtgttggcctcccaaagttctgggattacaggtgtgagtcactgttcctggccaatttttttttttttttttttttttttttttgagatgaagtctcgctctgtcacccaggctggagtgaagtggtgtgaccttggctcactgcaacctccacctcccaggttcaagtgaatctcctgtctgaacctcttgagtagctgggattacaggtgtgcactaccacgcctgggctaatttttgtatttttttagtagagatggagtttcaccatgttggtcaggctggtcttgaactcctgacctcaaatgatccatctgtctcggcctcccaaagtactgggattacaggcatgagccactgcacctggcctaattttttttttttttaaattagaggccaggtgcagtggctcatgcctgtagtaatctcaacaccttgggaggctgagacaggaggatcacttgaggccagaagttttagaccagcctgggcaacatagggagatcctgtcgctataaaaaaaaaaaaatagctgagcattgttggtgtgcctgggaagcagaggtggaggcaggaggattgctagagccctggaggttgaggctacagtgagccatgatggcttcgctgcactgtggcctgggtgccagagtgagaccctgtctcaaaaactaaaaaaaaaaaaaaatcaatctagggtgacactgtcattattggagtaccttctggaaacaaatgtagaacaaccacacctcagtccgggctggaagggattatcggagaaaggcactttgattagagttgggccaggcacagtgctcatgtttgtaatcccagcactttgtgaagccggggtaggagttcaagactatcctgggcagcatagcaagaccctgtctctacaaaaaataaaaaaaattagctaggtgtggtggtgtgtgcctgtggtctcagatacttgggaggggaggcttagggggaggattgcttgagcccaggaggtcaaggctgcagtgagccacagatagtgagtgccattgtactccagcctgggtgacagagcgagaccctgtctcaaaaaaaaaaaaaaaaaaaaaaaaaaaacgtaaggctgggcacggtggctcacgcctgtaatcccagcactttgggaggttgaggcgggcgaatcacgaggtcaggagttccgagaccagcccggccaacatagtgaaaccccgtctctactaaaaatacaaaaattagccaggcatgatggtgggcacctgtagtcccagctactcgggaggctaaggcaggagaattgcttgaacccaggaggtggaggttgtgatgggccaagatcgcaccactgcactccagcctgggcgacagagtgagactctgtctcaaaagaaaagaaaagaaaaaaaaaagtagagacagagtatagacctattcttttgtaatgtttagctaaaaggggagcaaaagtttgagggggctgtgaggtaatttggttggatttttaaaaagttttttgagatataattcatatactgtgcaattcgtctgtttaaagtgtttttgtatatttagtggtttttaatatattgacagatatgtgctgtcacaatttagtatattgacagatatcactacagtcagttttagaacattttcatcatctgaagaagaaatactgcattctttaactacccctgtttagctattcccccattcccctattcttccaaccttaagcaactcctgatctactttctgtctctaaagatttccctattctggacttttcattagaatagaatcatatactatgtgatattttataactgacttctttaatttagcataatattttcaaagttcaactatgttgtagtgtatattagtactccattcctttttgtggttaagtggtttttcattgtgtagctacatgccacattttgtttatccattcttctgctgatagacatttgggatgtttccactatagttggtttttgtgtgtgtgtgtgtgtgtgtgagatgtttgtatgtttttgtgctgatgggaataatcagagagggagacactgaatggaaagtatattggaaagacactgtggtagactgaggcgggcagattcgttgagctcaggagtttgagaccagcctaggcaacatggcgagactccgtatctataaaaaatgcgaaaactagccacgcatggtggcgtgtgactttcgtttcagctacttgagaggctgaggtgggaagatcagctgagcctggaaagttgaggctgcaatgagctgtgatcacaccactgcacttcagcctgggtggcagagtgagaccctgtctcaaaaaaaaaaaaaagctggacaatcaatctgcatttgtttgatttcatatttattaaggttcatgcatgcttatgcgtgccttccctttcagtgctttcagggcttcagattacaaaactgaagaggtttgtcaaagaattgaagcagaggaagcagtaatttagttagcagagtaaatagtacttgacctgaaggtgcttggtttatgtttgtggagtgagcttaatggaaaacaagatttgccatgaataatcaggaatataatttacccacaaatatacaaaagtatgaagccataaaagaactcagggtgtgagagtaagatgtcacaaaacaatgtagcttcctgtatgatgtgacacttctgtagacttcaaagggtgtcctggccccactagtcacctctgcttgctttcttttcacaggctgcctgggtctcagccatttgggtccccattggcccctgtgggcaaccagccacctgtgcttcagccctatggccctcccccgacaagtgcacaggtggctacgcagctgtctggaatgcagatcagcggtgctgtggccccagcccctccttcttcagggctgggctttggtgagtggctgtgaacacaggaatgttactgtcccctgttcagaggcatcagactctggggttatacctgaatctcttttatttcccttgtatttcctgtgcctctgagcctcagaagatgggacagtcatatttgcccctcttgtgtggaaagggaagtgatataccgaacaaggaggcagaatgactgggcttttgactctacctttattctacttctcaggcccaccaacatcgctggcttcagcctcaggaagtttccctaactctggtctgtatggctcctatcctcagggccaggctcctccccttagccaggcccaaggtcatcctgggatccagactccccagcgatctgccccatcacaggcctccagcttcacacccccagcttcagggggtcctcggctgccttcgatgactggtccactcctgcctggacagagttttggagggccctcagtgagccagcccaaccatgtgtcttcacctcctcaagctctgccccctggcacccagatgactgggcccctgggaccactgccacctatgcactccccgcagcagccaggctatcagccccaacaaaatggtgagtctttcccaaggtctgtcttagaagctagaggcttcagctactcaggtggtttttgatgttttttatttgtttgtttttagtattacttgctaagtggtgaattagatgggtagcttcagggtattattcctaggatatggggtttgtaagacattattttttcttgtcgttctgataacatggtatttttctgaatgtctttgccaggcattagtgtgcctcataattctatgtttttaggagtctagtcattttcctgaggccttaagaagagatagggatgggattttgagttcatcaaccttgtgtccttgtctcaggttccttcggaccagcccggggccctcagtctaattatggaggcccctacccagcagcacccacctttggcagtcagcctgggcctcctcagccactgcctcctaagcgcctggaccctgatgccatcccaagccctgtaagtagaaactttcatggtcctgaggaagggtttgtgtctgccagataggcaggtcaatctagatgaaatgtttgcctagcattttctgataattttccctttttgttcatcttcttggagaacttacatataatttgattctgaactggaacttgaggttctaggagtcttttggggggctgttttactctatagctgggcagagaaggaagggaaaccaagagtgagcagcagcaccagtagatgtctgagggctgcactctgtcactactgtacatacatagtatagtagcctttgtccttctgtggagcagtgactgggtcttgtccccttagatctagaaggatggcattcttcctaatgggtagagcaggtgggaattctctgatgttagatgttaagagaaggaaagcctcactggtttctctgctcttacttggacagttttaggaggaagtccccagtacttttgtttggtaggcttctgctgtgtggatggggaagagtgaacgacagtttatgagggcagtgtgtatgtaaagtcccactggagagctgcttttttcaggaagagggtgaattgcacccttggagccatcagaatcctcaggccctccttatcagactcagaatagagactaggactgtactgccaagtaggggccactttatagttccacctgtaacatttgctatgtcagttaccttgccatgcttagccattgtcatattccattctgttctcgtccctcttcctcctttgggtaaccaacacagtgagggagcctgttggccaaggagaactcaagaggattaagcagcctctccttccttccccctccttcagtgagaaggagagtctggttggacatgaagggaggcttctttcagcataagatagtccttagaatgggaggtttggccttttagggggaacactcctcttcttcttccttaaggtttcttccattcagcctcagcccctccctgtgtaactcctgcttgcctcctgtttgcccctttccttatctttctacatcatagtctgagccattaaagcctctgtgttgggccagaaagacttggaatttcatatctagagggggcttgatttcagcaatatgagctgggctccagctgttcatgtctaactcaacagggttgagagaagtaacatctgcctcttgttcttttgtctccctccttgtattcccctgctgcatttattattaaaacactaaaagcaactcagtgagctgcctcctcagcagaaaaccaggcacagaatagaccccgatgccattcctagtccagtaagtgcagggggtgggtgtttgtgcatgtcattcctgtgttagtgccatccatgcatgcctgtgacctcatcttcacctcatctaccatgtccattcctccccattctcttcctttagcctagcccttctagatactcacttatacaagataaaaggatatgcatgcctcaagtcaccaggtaatgaagaggtagcaagctgtttgccttgagtatggggtggtggaaggtcaggctctaagggtggggtcaggtggcatgtcaagctttggctttagttctgctggcacctccaggagcctgcaggtgatgtatgatggaagaggacaaagttgaacggtagatcattccactttggatttgatttgtctgtagcctgttgtggagaaatattggagtaggaatgtacagattcatagtatcccaaactggcatttcttacaggagaagggactgctggtttgggaaagtgtgggtgctttctcatctgaagagtctttttgactctgatatatttctaagcttcaacctttctgctatgggatagagtcttatttgccctttgctttttctggttttccaaacccatcttgaagtaactgaccaaaggtcattagcctgcataaaggtctgaataccagctttgcaggtcctttattttcctttgctgagtctgtcaaaatgtggaggactgaggattgagctataaggattgggtacttctcctctcctcctatatatacacattgatgcttacctgaaagtaaggcagcatctgcttcctcaccttacttgatcatttctggctgtttaaatctctcctcaccctgtcccttgtaatttcattgagtgtagagtcattccaggtagattcatttttacgtggttactgttgtctgttttcctgctctgactcagaatgtgtcttggggagaggatcggggaaggcatgatgggggaggggaatggaatctaatcatgtttgaaggtttgtgatcagagctggggcttttcctggaatgggaggaatgagagggtgttcaccattgatggggggtagggggcaattcataaagaagcccattctcatgttgcctgcccagcaggctgctgggagtgaaagattggctgctgtagagtgtaagattggcattacagcattttatatgatctccagaaggagaacaggcctggtgtatgaggtgttccttggcaaatttttagtttttgtgttacagctctagcctttttcactcttggcactctgggacctcacacttcctttttcttctgtcacctcattcattgcacttctctgcagattcaggtcattgaagatgacaggaacaaccggggtacagagccatttgttactggagtacggggccaggtgccacccttagtcactaccaacttcctggtgaaagaccaaggtgagaatggaattagctcctcccacaggggctttttcttcaagattatcagcttatggttggggcttttttttttttttttttttttttttttttttagtttttaaccagagacaagttccctctagtccctctgggggaaaaagccaccatcacctctagctttgtggagttgatggtgtggatcaccaatggagagctggtgtctggaaggattctgtgatctgactcgggtcttctgcctccttcttcagggaatgcaagtccccgatacatccgatgtacatcctataatatcccttgcacatctgacatggctaagcaggctcaggtgcccctggcagcagtcatcaaaccgctggcaaggctgcccccagaggaggtgagtcagggaaggggctagagtgtaatgaaagggagggaggtagagaggggtctaaagcgtcttcctggatgtgattccagcttcacaatggaagatattttagttaggcaggagaggagactgtctttagtggctttctatcccagggcccatgcctggagaggggatggtagggatgagagcaaaagcccaagacattgctgagaaggaacagagtctctagaggaaacaagcaggatgaaaagaggtagggccaggccaggcgcagtggctcacgcctgtaatcccagcactttgggaggctgaggcgggtggatcacgaggacaggagatcaagaccatcctggctaacacggtgaaaccccgtctctatgaaaaatacaaaaaattagccgggcgtggtggcgggcgcctgtagtcccagctacttgggagactgaggcaggagaatggcgtgaacccgggaggcagagcttgcagtgaggcgagattgcaccactgcactccagcctgggcaacagagcgagactctgtctcaaaaaaaaaaaaaaaaacaagaggtagggccaaattgtaggggagaagacagctgaatgtaggaacctctcgtatcatggtcatctccagatgatgagaaggacatcattccatgttttcctgactgtcctgtcatcccaggttagtgctgttagaacagcatataagagaaaaggtagattaggatccagtgatccttctgtcacctgttttgggacctgatctgtcaccccagtacctgataccagcatgaagagagcgagccaggcagctgctccaccaggccttggtaggatactcatattcagccttgcttatcttacgatagggttctctgttactagaagccaaaggctcagtttatattctgcttatctctccgtctttctctgtgtgtttgtctatttctatctgggtcccattggggatagttgggcactggtctcttatgtgtagggtgacatttgcctggggcatcagtaactggcacagaatcccagggatacgggaggaggtgttacagatatttggttagggaaggagctggaatcaagattcttagagcaagagtgaagggcattagagatggggccagaaaggagaatcctagataatcttggctttctccctcatatgcccatggcagcccctagtctgatatggccggttttgcatttcctcttctctttcagtgagaaatgcagctctgggggtgggatgtaggaagagggaactatataatttttactcatagggacattttcctgtgatttgtctttactccctttcatcattgtgctccctactccctctgcagacagaatatctgcgccatgcgccttcttcctccggttgttcttcctcatctcctggctgaacctactgtggttttcctttatgtctgatcccttcccctttgcgccttaggcttcaccgtatgttgtggaccatggggaatctggccctttgcgctgcaaccgctgcaaagcatacatgtgtcccttcatgcagttcattgaaggagggaggcgtttccagtgctgtttttgcagctgtatcaatgatggtatgttcatggaagctgggatttgggggaaggtcttgattgtatcttccttgttctctattaaatagttagagagatgagggtccatctttcaggagctggggaagtagggcacatgggaatgagggatagtggtgtgagctcagctagggccagaatactaagattgaaactggatcttcgagtaacacactgccatgcttcccacagttcccccccagtattttcagcacctggatcataccggcaaacgtgtggatgcttatgaccgccctgagctatccctgggctcttatgaattcttggccactgtagattactgcaaggtgagggaaggtagcatgggaggagcagtgagtggaggataatgagacagctgagaatggctgttatcatttccctcaccccttttttgtccctttttgatgctgacttctctatagtcaactggcctgcttaccattccccctctccccaacattttcttcctctgcagaacaataagttccccagccctcctgcctttatcttcatgattgacgtctcctacaatgccatcaggactggtcttgttaggctcctctgtgaggagctcaagtcactgttagactttctacctaggtgagagttacagaactgaggtgtttcctgaggttaatgatagggtgtctgggttgactgaagaaatgtagcttggtgtcatgaagttgtgggtggtggaaaaggtggcaagtctaggtaacaatgtcaccttctacagggagggtggggcagaagagtcagcaatccgcgttggctttgtcacctacaataaggtgctccacttctataatgtgaagagctcattggcccagccacagatgatggttgtgtctgatgtggctgacatgtttgtgccactgctggatggcttcctggtcaacgtcaatgagtctcgggcagttatcaccaggtaagagccagattgtggaggtaaaggttgggggtggcatgggtaccaccatagaaggtcatggagttgaacagaggtattggacagtagatggaaaggggttgtggcccaggagttgtcagattctagaggcttgatgactcttcagggaatcgagaactgaggtatctggaatctgtatagcaattttggttgttttccgtcacctatctctttagcttattggatcagattccagaaatgtttgcagacacaagggaaacagagacagtatttgtaccagttatccaggctggaatggaggctctgaaggtaaggctggagtatcgggcaacctcctctaactccattttcctctgaccatcttatcccctgggatacaacctctctttcttcagtagtgggtgactgtccagtgtgttagactgtctgacatagctggtgcttaataaatgacaagggaagagatggatgaataaagaataaacaagtagtcctctcttttttcctaggctgctgagtgtgcagggaagctctttctattccatacatccctgcccattgcagaggccccagggaaactgaagaacagagatgacaggaagctgatcaatacagacaaggagaaggtgtgggactggaaaatgggggaggggaaggatttttcattacagaggaagtggggactctactttcttgatggtggctaggaccagacactccaccctttcaaataccatatctgtgactgccaacctccactgctgccatacttctctactccatctgatgccaaagctgttggtagactcttgtatttatttattttttaaagaagaacttttggccgggcatgatggctcatgcctgtaatccgagcgctttgggaggccaaggcgggcagatttttgaggccagaagtttgagaccagcctgactaacatggcaaaaccccgtctctactaaaaatacaaaaattagccaggtgtggtggcacacacctgtaatcccagctacttgggagtctgaggcaggagaatcgcttgaacctgggaggcagaggttgcagtgagctgagatcatgccactctatgccagcctgggtgacagagtgagaccctgtctcaaaaaaataaaaataatataaaagaaaattttttactattggaaaatccttggaagtagatctgaagtcttccatgaatttgaatatcccatgctagatatacagttttcaaatagggcggagctgagatatttgaacattttcttctccccattttctttccccctagactctgttccagcctcagacaggtgcctatcagaccctggccaaagagtgtgtggcccaaggctgctgtgtagatctctttctcttccctaaccagtatgtggatgtggccacactctctgttgtgccccagctcactggtggctctgtctacaaatatgcttcctttcaggtatggtgtgggatttggggcagcaggtggcagcagggctgggaatatctgcttatatatgcagtggctgactcattaatagaaatagtgttggggccaggcacggtgcctcacacctgtaatcctagcactttgggaggctgaggcaggcagatcacctgaggtcaggagttcaagaccagcctggccaacatggcaaaaccccatctctacgaaaaatacaaaaattagtcgggtgtggtggcgggcgcctgtaatcccagctactcaggaagctaagaatcccttgaacccgggaggtggaggttgtggtgagccgagattgcgccactgcactccagccagagcgacagagtaagactccgtctccaaaaaagaagaaatagtgttggaagagaagactgcatagtctgaagaagtgagcccgagaatgtggcagttaggaacatgggccttggaatcagtcctgcattgatattctggccccaccacttactagctacatgacctaggataaatttcttaagtacttcctcttttgttccttcatctgcaaaatggtgttaaaatacttaagtaggatttgtcaacagaattaaataattatatgtaaagcactctgtgtggtacctggcatgcagtctaagtgtttaaaagctattattgtcatcatcattatcatcctcactgttatgatgatgataattaggtggccttgtagagtggaaggggtacagggagattgtctgcacgatgagctatgtctagtcagtgacatgactctggacctgggggcctgcaggtggagaacgaccaggagcggttcctgagtgacctgcgtcgtgatgtccagaaggttgttggctttgatgctgtgatgcgggtccggacaagcactggtcagtcctgattgaagagcaggttggggggctaaatatggaagggaggcatgtggcacttgtcatactttttgccctgaccctgtccatgtggcctcaggtatccgtgctgtagatttctttggagctttctacatgagcaacacgacagatgtggagctggctgggctagatggggacaaaacagtgactgtggagttcaagcatgacgatcggctcaatgaagagagcggagctctcctgcaggtggcaggcgggaggcggggctgggcaggaagtgtttcattcgcttggtatagaagagggtgaggaatgggtagagagcactaaaagaagagacagggcacgggagtggctcatttctctcttccagtttaatagtgtagcaaagggcctttgtgagggaggggtgtgagttccccctttctcctttcccctagtgtgccctgctttacaccagctgtgcagggcagcgtcggctccgcatccataatctggccctgaactgctgcacccagctggctgatctatatcgaaactgtgagactgacacgctcatcaactacatggccaagtttggtgagggtagaagcagggcagggtgggattggggctgagaggtccaggatggtgagtgggtagttgtgatggtgggaatgcacacatgatgggcagctgaccagtgactatctttgctttcccatccagcatatcggggagtcctgaatagccctgtgaaggctgttcgtgacacgctcatcacccagtgtgcccagatcctggcctgttacagaaagaactgtgctagcccctcctctgcaggacaggtggggcaagtatattagtgggaggtggggttgttgggacaaatgtttgcatttgggagggatttctcatgatcattgactttattttgataatcccctcagttgatccttcctgagtgcatgaagctactcccagtttacctgaactgtgtgttgaagagtgatgtcctgcagcctggagctgaagtcactactgatgaccgtgcctatgtccgacagctagttacctccatggatgtgactgagaccaatgtcttcttctaccctcggctcttacctttggtgcgattgagggttggagtatgagatcttgcacggagcaaagggcctcttaggaggaggaaaggataggctagtatcagtcagacactagtggaatttgtttttatgtattttagctgatgtaattttcacactgagagagttactgagaccccagaaggggtggtgtctgaggacttagctttcaaaattttgtgtgtggtgcgggggggcagacttgtcttatggtccttggtaaccttttgctcccttccttttgtctagacaaagtctcccgttgagagtactaccgaaccaccagcagttcgagcctctgaagagcgtctaagcaatggggatatatatttactggagaatgggctcaacctcttcctctgggtgggagcaagcgtccaacagggtgttgtccagagccttttcagcgtctcctccttcagtcagatcaccagtggtttggtgagggcagggagtcaaggagaatatgggtgtggaagtatactttgtgaaacaattgggagccaatatagttagtgtgctagtaccctcaaatatcagggaacacttggggacaagggcagttgctgtcattcttcccaggtttgcctgtttcagatgatgcatacatgtatgctgccccaccttgactgaactcagagtgccttaccataaggataaatgaattttgtgttctagagtgttctgccagttctggataatccactgtccaagaaggttcgaggcctcattgatagcttacgggcacagagatcccggtacatgaaggtaacactgatctgaaccctggatttcttaccttgtcaagtcctcacctagaagtgggggttgggtggggaatgagtaagtgactgcctaatgagatttctgggcatgtttaatttcctttggccttgccttatgaaccctgaattctggccgtagcttaccgtggtgaaacaggaagacaagatggagatgctgttcaagcacttcctggtggaagacaagagtctgagtgggggagcatcttatgtggactttctctgtcatatgcacaaggagattcggcagctactgagctaaagcaagtgggtaaatggcatagggcccaggctagcttccagaaagcaccccaggatgtcagagaaattgggacagtaacatatcttatgtaagctgacctcagtctctctggggggagggggagatataaggagacaccttctttctgggctcaagtatcctgccactctgtcatgtcctgctgatggaaggtgcccctgttccctcattctaccctctttttcctgctaatcctgtcataatgaatgtagcttctcagttcactgtatatgattcggtattgggggtttggaggcacccagaccctggcaatattatgtgtccctttggaccagtctcccaagaggagaggggcaggcaggaaagagtggggatcctaaggttactacagggggctcagtgtcatccacaacttcctatattagggataaaacatataggtgcacaagagctggggtatagcccataggtggtggagagaaaagtggtcagtccttcttgggcctggaggttagcagtcaagtttctctgctttcactgctcgctcgctctctcctgcaatgattgatgatcactccgtggatagagaggcacactgtcagaggtgaccggagaactgagttgcaaaatatattaagatctggtagaggtaccagcttcctttccagctggagaggccccaacactggatggttctgtagggagcctagggagcctggtcatcaacttgcaatacctcacagagccagttcacatcccactctgagctcccacgagaaacactgcttctccaggcccggggttgttggggagagaggcagaggcagctggagcgccgttctctcctgctgggacaccgcttgggctttggtattgactgagtggctgacagttatcttccaaccccaactggcttgggggcaggacaagggctaggcttgatggtggccaggcttgcctgctccccacctgggatgcccctgctctggacctctcatttctcttcattggtttatttttcaatgcatctttaatttgtaaagaaataaaataaattaagatgtaaccattagcctcatctttactcccgaaagctcactttgcttttagtcctggccgtcggctgagcgagctgcgcatgcgccacgtgcccccgtggcgtagggcctcgtccggtcacgactatccgctgggcggggtcggtgctggccgagggggcgccggctgccggagtggacatggcggccggccccattagggtggtgttggtccttctaggggtgctcagtgtctgtgcagccagcggccatgggtccgtagcggagagggaggccggcggggaggcggagtgggcggaaccgtgggatggcgcggttttccggccgccctcggcgctgggcgcagtgggggtgacgcgcagctctgggacgccgcggccagggagggaggaggcgggggacttgccggtactgctgtggtggagcccagggctattcccccacttcccgggagactcggagcgcatcgagtgtgcgcgcggcgcgtgcgtggcgtcccggaaccgccgagcgctgagggactcgcggacgcgcgcgctgctcttctacggcacagacttccgcgcgtcggccgccccgctgccgcgcctggcgcaccagagctgggcgctcctccacgaggagtcgcccctcaacaacttcttgctgagccacggcccgggcatccgcctcttcaatcttacctccaccttcagtcgccactcggattacccgctgtcgctgcagtggctgcccgggaccgcctatctgcgccgcccggtgcctccgcccatggaacgcgcggagtggcgccgccgcggctacgcgccgctgctctatctgcagtcacactgcgacgtgccagcggaccgggaccgctacgtgcgcgagctcatgcgccacatcccggtgagtgagggcgggccggagggaaggaaaaggagagggcgggttgaggccaggactccaggtgtccaggactccaggtgtccaggactccaggtgtccaggcctccagggccgcaccctcatgacagccttactgtacccggtctaggtagactcctacgggaaatgcctgcagaatcgggagctgcctaccgcgcggctacaggacacagccacggccaccaccgaggatccagagctcttggctttcttgtcccgctataagttccacttggccctggaaaatgccatctgtaacgactacatgacagaaaaactgtggcgtcccatgcacctgggcgctgtgcccgtgtaccgcggttctccctctgtgagggactggatgccgaacaatcactccgtcatcctgattgatgattttgagtctcctcagaagctggcagagtttattgactttctggacaagaatgatgaggagtatatgaaatacctggcatacaagcaacctgggggcatcaccaaccaatttcttctggatagtctgaagcatcgggagtggggagtgaatgatcctttgctgcctaactacctcaacggcttcgagtgtttcgtctgtgactacgaactggctcggctggatgccgagaaagcccacgcggcctctcccggggacagccccgtctttgagccccacattgcccagccctcacacatggactgcccagtgcccacacctggctttggcaatgtggaagagattcctgagaatgacaggtaagagtgctggggtcccctgcagctatcaaatcatttacttacttgcttactgtgggcaattaagtagcactaggtgctgagcaggtgcaggaggaaattatcacatgggctcattctgtatttaaggtgtcaacagtctagttggggggataagacaagctgaaaaagctgaatagatgtaaaatataattcaaggcaacgtatgaaaatcagcttatgtgaacaatgtttccagtagtggttcaaaaagattgaaccagagtacagggcctgtgcagacaggggagagagaaaatggggcaaataaatagggacaaggctataaatatcattaataccaggttcaggagtttgcactgcactaaaaatcaactcagctatttgagcaccttttatagagtggaaatggggttgggcagtagagaagagcacttttagagaggcttttctgcagtagtcaggggttacacctgttaaccagccataatttttttttttaagcggctgtgctgaggatgagccccatgtagttggtgcaggtggggacacactgcctgtgtaactagaaaaactaggcatggccgggcacggtggctcacacctgtaatcccagcactttgggaggtcaaggggggaggaacacttgaggccagagacaatataatatataatataatatattgaccagcctggacaatataataagagcctctctgtacaatttaaaaactaaaagcctggggtggtggcacatacctgtagtcctggctacttgggaggctgtggcaggtggattgcttgaacctaggagttcaatgctgtagtgagctaggatcgtgccactgcattccagcctgggttggagtaagaccctgtcacacacacacacacacacaaaacaatgcacaatgcgcatcagaagggaagcgaataggctactgtagtaggtggcaaaaggtggtggtactgggaaacaaggccagcgtgtggtgtggggtgggaaaatgttgaaaccacttgtagcaagccacacctattgggggagaggtgataagattattaagctgaagtaaggctgctagaatggcctatagaaaccgacttggacagtggatggcagcagaaggccatttattaacagatgctgctggcagttttgtcctgatggttggaatccttcaccaagtaatttgtatctaattacaaattgtttgtatctgaacataatatgatttactagaggaaaagtatgaaaaaatatgaaacattaagaaaataaatattcaggttatgtcttttctagatactggatgctacttcattttgatgcaccttcattttgattattggcataaaggtgaaacttaaaagataatcatctaaagacccctgcccccttgctttccttatggagactgccacttccagtctggcctctgctttgcctgcctctgaaccccctccacatttgggagccagaagcaggcaagtcaggaatcgtaattgattgggtagtctgtgtgatgtctttgtgtttgtgacttactgcctgtcgcttgggcttatattggatttacttcactttgtcttcctttcacagcagtcttgtccaagttagagaccactgtatctgcttaagatttctttggccccactcggaaaaaggcaggactcataactatgctgcagttccataatccaacccccattttgatatttcagttggaaagagatgtggctgcaagattattggcaaggtctggaccagggggaagctctcactgccatgatccacaacaatgaaacagagcagacgaaattttgggattacctacatgaaatcttcatgaagaggcaacatctctaagtgcccttgcaagagcctttaacttggcggagctaaggagatcttattctaccatgggacataaggagcatccactgcacaaacccttaatgaacactgtcttttcatggattcaaggaattccagttttatctattaagattttatcttaatgatgagtagccaaggtctaacatagggcctctcctcaaggagagatggagggatacaattcttggttcagtgggaaacagaaccctaaaacatccatttgattcaaggtgctggtccaacagagtttttaaactactcacttctttatttcatcctttcgactgtacttgattaccagtgaagtaagatgggtcaggttacgacttacaacttttgttctattccccagactcctcattattcagtacatttcccaataatctctttttctcatctcttgctttataaattgttacgttggtggagaagcaaaacatttggtgagttgtattctggttttccggagttggatttttttatattatatactttcatgtcaaacttctattttacttatttatttatttttttaaaatattttttgtagagatgaggttttgccacattgcccaggttggtctccaactcctggatcaagcaatccatccgccttgacctcccagagtgctgggtttacaggcatcagccacctcacccagccctaattttttttttttttttggctttttctggccaggcgtagtggcttatgcctgtaatcccaacactttgggaggccgaggagaggcgactgcttgaagccaggagtttgagaccatcctagcaagaccttgtctctaaaaaataaaagaattagcagggcatggtggtgcacacctgtagccctagatacttgggaggttgaggcaggaggatcacttgagtccaggaatttaaggctgcaatgagctatgatcatgatcactgcactccagcctgggtgacagagcgagacaccgtctcaaattatatatatatattaagatggagtcttgctttgtcaccagctggagtgcagtggcatgatctcgggtcactgcaacctccacctccctggttcaagcgattctcctgcctcagcctcctgagtagctgggactacaggcatgcaccaccacgcccagctaattttttgtatttctagtagagacagggtttcgccatgttggcaaggatagtctcgatttcttgacttcgtgatccgcccgccttggcctcccaaagtgctgggattacaggtgtcagccaccgcacccggcctcaaatacatttttttaatggccttgtctttcctggttttaggcccttttccacaatttctgatggaaatacagaaaccttgccatcattcttactgctggtttgcatctcatttatggtgtatctgggatttcttctcatgaacagaaagattcagtggctgttatatgccttgtcaatttaatgtattgccctatcctctttttgatcaaagatagagactaagactgggaattatgacagaaaaagtcatatttttctttaaatgattttgaaatgttaaaataggccaatatgagtcaaagtgcaaattttttggtgagtaggttgacaaaaaaaaaaaaaaatccaggaaaaaaagtgcaaatttttataggtcctaattcttttgtttgcctaatgaagtgttccctctattttattgtttttatatgctacaaagtcccatcttctgcagttatggaaacagtgtggctgtatgttttagtaattatttcataatctgtagcacttttcactttaagtgcaatgaatagtccagcttcattcactgtattactaatacgcttccctatgactttttttttttttttgagatggagtttcgctcttgttgcccaggctggagtgcagtggcgcgatctcagcttactagaatctctgcattcccagttcaagtgattctcctgcctcagcctccctagtagtggggattacaggcgcccgtcaccacatctagctaatttttgtatttttagtagagatggggtttcaccatgttggccagtctggtgtcgaactcctgagctcaggtgattcacttgccttggcctcccaaagtcctgggattacaggcgtgagccaccgtgcccaggtgcccccaccttttttttttttttgaggcagagtctcactccatcaccaaggctagagtgcagtggcgtgattttggctcactgcagcctctgcctcccaggttcaagcaattctcgtgtctcagcctccagagtggtgggattacaggcacgcactaccatgcctggctaatttttttgtatttgttttagtagaaacagggttttgccatgttggccaggctggtctcggactcctgacctcaagtgacccacccgcctcggcctcccaaagtgctgggattacaggagtgagccccgtgcccagcctgagactactttttgatggagcccactcaaggggatgaggaggtttaagccacaagtggctggctaaataaaagcttagtcagagctgggcacggtggctcacacctgtaatcccagctacttgggaggctgaggcaggagaattgcttgaacctgggaggcagaggttgcagtgagctgagatcgcaccattgcactccagcctgggtgacgagcgaaactccatcccaaaaaaaaaaaaaaaaaaaaagcttagtcagatttggggatgcagccaaacccttctgttgctgtggtttgaacatacagtctaatgagcagggagaccattagctctttctggggcagtgggacaggaaagaataccttggaccttagggctactctagttgtaatgtattagtgagttatcactagagaagttccacagtttaatattatctatacctatatctatatatctacctatatagatagatatatgttagatgcttcaacaactagggtctacacttaatatactgacatctaaggatgcggccaagaaaagctgtaattaggctgaattttattgccaaagttgttcttttttcatttagtcctttaataaaagatgatcttcataaattacagaaagtttgcttaccctgtttgaccttttgcagaaaagaacaagagggaagacagaccttcaggctgggtgcagtggctcatgcctgtgatcccagcactttgggaggccaaggtaggaggatcgcttgagcccagggattcaagaccagcttgggtaacatggtaaaaccccatctctacaaaaaacagaaaaaattagctgggcatggtgtgtgtgccttgtagatccagctacttgggaggctgaagtgggaggatcgccactgcactccagaaactaaaaaaaaaaaaaaaaaaaaccttcaaaaatatatctaagccagatgtgatggcatgggtctgcagtcccagctactcagaaggctaaggcaggaagatcgcttgagcccaagagtttgaggctgtagtatgctgtgagtgcgcctatgagtgccaactgggcaacacagtgagacctctgtctaaaaaaaaaaaaaaaatctgttgggctgggtgagctggctcacgcctgtaatcccagcactctgggaggccaaggcaggcagaccacctgaagtcgggagttcaagaccagcctgaccaacatggagaaacctcatctctactaaaaatacaaaattagctgggcgtggtggcgcatgactataatcccagctactcaggaggctgaggcagaagaatcgcttgaacccaggaggcggaggtggtggtgaaccaagatcacgccattgcactccagcctggacaacaagagcaaaactccatttcaaaaaaaaaaaaaaaatctgttaaaatttgatatagtaggcactgacaaaagaggtcaaatgcaggactgatttctaagcttgcaatctatctaaatgcagatgctaatttagagtgcataattattacacaagtacagacctaggttagggcttaaatttcattatgtgcaataaaaaggttaagtgatggttaagcaaggtgtagattatccttacctctcctaatgacatgggctcacattggcattcctttcatacttttacgtataaagtgggcagttgtttctgaatgactgttgctggagcctcaggcctgctttgtgcttggtgctttccagactttctcctttattcctatcaccatatacgtactcacaaaagagcagtgtaaaccaggtattacatttccacaagggaaagtagaaccaggaatagccacatgatacttaccgaaagcttcactttccctatagagaaagcaagcaacatgaatcttctgatttggggcccagcctgctgctgtatacagaggttggcattattggtgatagaaatgtctgataggagtcttttaattatactctggagtgtggaggtggagtgcaaggctgcttcctttattactgcaagtgttattttctattatctcaggtttcgttttgtgtaataaactgcttcttgttaaacaatgtcttctgcttcattatttttttgggggtgggtgtaataaagttggagatttgtaaaaaagtttcaggttgggtgtggtggctcatgcctgtaatccctgcactttgggaggccaaggagggaagctcacgtgagcccaggagttcaagagtagtctgcgcaacatactgagaccccatctctacaaaaaataaaaccaagccagccgggtttggtggtgtgagcctgtggtcgcagctactccagcagctgaggcaggaggatcactggagtgaggccaaggctgcagtgagctaatattccactgcactccaacctgggtgacagaacaagaccccaaatccaaaaataaataaataaataaaacatttgctcatttaacaagtatttattggtactattctaggcactggggattcagcaatgaacaagatagacaacgttccttctttcatgcttacatttttaaatgggtgttagggataggtaaggccataataagacaattcagactgtgataggtgctatggagaaaacaggttgatggtggtgaggtgtgagaggtcagggaagccctctgtgacatgaactgagacttaagggaagaaaaataagcagccatgcagaaatcagtgggaagattccaaacatctgtgataagtgatttttttaacacactaaatttacaaatccaaatgttcttcctccaaagtagtcatgagctacaggcttgttttctgcttccattaccaaaaacatttcttggagcttatttggaaatgctttgagaatatgctgcacatctttggaatgagttgtgaaaatggccagaagaagtcacttgagaaacaagtctggctgggcgcggaggctcagtcatgtaaagcactttgggagggcgaggcaggaagatcgcttgaacccaggagttcgagaccagcccgggcaacatgacaaaaccccgtctctacaaaaaataattagctgggcgtggtgtcttgcacctgtgttctcagctactcaggaggcagaggcgggaggatcgtttgagttcaggagtttaaagctgcagtgagctatgaacgtgccacttgcactccagtctgggcaaccaagagagaccctatctcaaaaaaaattctgattaagcatcacaactgaaggtccaagtctgtaagactggcgagaggactgaaaaagacgatgaatgccaagtgtttaagcttcatcctaccaactgagattgttataaatgagcaaacggtatctaactagtagcagtagtagcagttgttgttgttataaaatgaaacaagtctaatttttctttgcggctttgtagtggtcctataggcagtgaaaaacgacagttctttcaggtttattaaagtaaaacacgaatctttcccaacccaacatcttaaagtctcaaattttgattcgccacccccccccccaaccccgccctatgccaatcgcccctagaccaagccggctaccaccagaacagtgtccacttaccagggccctttcctgcatgtccccggccccgtactgcccccagacttcggggcccggagcccatcaaggagaagcctcagtcggcgtacgaacccagagtctcctcctaatctgctgacaagtatgaacccgccgctgttcgaacccagcgtcgccgcagccccggccaagtaaaagaaagaggtggctgccagcaagccaacgagccttccccgagctccgcgccgattcgtccagcccgtaggggtcacgcgaggtcacgcacggaaccgcaaagcctgccgggagcttggtgcgctatggcgacacccagcctgcggggtcgtctggcgcggtttgggaacccgcggaagcctgtgctgaagcccaataaacctctcattctagctaaccgcgtcggggagcggcgccgggagaagggcggtgagcagtcggagtcaggacggccccggagcggaagccggagcatgagcaggggcgggtgggtaggagggcaggaaggtgggtcttcttgtgactgaaggtcccccggatctgcccctccagaggcgacttgcatcacggagatgtcggtgatgatggcttgctggaagcagaatgaattccgcgacgatgcgtgcagaaaagagatccagggcttcctcgattgtgccgcgagggctcaggtgaccgatggctcctggggtgctttctcaggaaaagaatgggggagatagaagtaatgattctccctgccttttgctaggaaaggccctttcattcatttgggaggtatattattcacgccaaagtgggaaaggttacagttttgaaggctgtgtgatcttgacggatttattcattgctctgaactttcgagttactgtacgtaaaatgaggctaaccaataccaccttaaagaatgttgtgagtgtcagatgaagtaatgaatgggaaaatcattttgaaaaatgtaaattgctgctcaagtagacattattgtgtgaaatagaactaaagagactaaaactaaataatgacaatagtttggtttcctgtctaggcttaattgttagctgagatagtagcttctgaacatagtctcatttgtaggtcccaacgcccttttgttgaaaagaggctgacatagatctctccaggctggttaacatcttcatgtgctttagggcattgtgagaactatgggcctacatcaggacaaacttgattgattgattggttttttgggtcagatcttaaaagtctggactagacaaactgtagagctgtcattcttgtatttgttttgtgttttcaggaagcccgaaagatgagatcaatacaggaaaccctgggagagtctgggagtttacttccaaataaattgaataagttgttacagaggtttcctaacaaaccttacctcagctgaaaatggacaagtattttcaatgactgaaatatagcttctgacaactatgcagaggcattttagagacattggcattgccatgccctctttggagggtagaagaggcaaaacacttttttcaccctttggaatcatagtatgggtagaagttatgatttatcttgaaataaaatcctctgaacagaacttggccttttgttgtgaattaggtactctcttcattcttgagcctcccctagaccctggaaattctttccttcctgatttgccctaggagcaggacaaataccgttgtattgtctttccctgcatttgaagtcttttacaccatttagtgcccttgcttttggatgcaataaggaagttgaagttgccttcgtctgtaaatacttagtgattgcctattttgtgcgtagtccctgcaaggtgctctctgaataataaagttaacaaactggtgacctagaggttctgcagatatgttttatttgatccacgcagttaaaaaaagttttaaaattagctggtcacgttcaaaaataggaaaaaaagtcattaaaatttcacattttagctgtatttatttatttgtttaagacgcagtctcgctctgttgcccaggctggagtgcaatggcactatctcagctcactgcaacctccgcctccaaggttcaagtgattctcctgcctcagctttctgagtagctgggattacaggcacccaccatcatgacgggctaatttttctattttcagtagagacggggtttcaccatgttggccaggctggtctcgaactcctgacctcaagtggaccacccgccttggcctcccaaagtgctgggattacaggcatgagccactgtgcccagccacttattttttttaataaaaaaaattaaaagctctggcagccttattttcttatttccacctggcagtaattaggtagagctgattatcatttgtctgcattctccagtgacctcaccactggactctacaaaatggtgaaacagaattaacaaatgtctactttgtttattacctgtttccttctctcaagttagctgcctagttgctgaaggcattcgcttttgtgattcccctgatactaggaaaaattgcatagcattttatgtatactctgccctttcaggcataattcagttagctttttttttttttttgagatggagtctcgctctgtcgcccgcgctagtgcagtggcacgatcttggctcactgcaagctccgtttcccgggttcacgccattctcctgcctcagcctcccgagtagctgggactacaggcgcccaccaccacgcctggctaattctttgcattttcagtagagacggggtttcaccgtgttagccaggatggtctcgatctcctgacctcgtgatttgcccgcctcagcctcccaaagtgctaggattacaggcgtaagccaccgcgcctggccttaggagttcttaacctaggtcaatagactccagttaagacgtctgtgaacttgggggataatttatatttttaactccaactgaaatttagcatttcagtcagggctatggaaaacaaaccacagtaacattatcaaaacctatatgaaatcatggtattttcataccatgttacagttggttacaaatatctcaaaaagcatttatactcatcactagcttcaaaattatgatagttactacgcttcctcctagatcttgtcatttaatgtgtaaataaaggagcactattacgttacagatttgttctattaatagtttaataattgtatttaaacaactggtttcctttgtaattcttggtattttgtgcatttgtaaacgatctgagaagggggtccagaaacctacctagactgctaaagggtccatggcacaaaaaaaggttgagttactagatccaaaggccgtatggacaaacagtacaaccatttcctgaaatcaaatgcattcttttctgatgtttccccagttagaccctataaaaaggtcggctggattgcagacttctggactacgattcccagaaggtggtgcggccctggggcctatccagagttaagacaataactccatccaatagttgctgtcctctcctgacagcctacaattcccaacatgcatggcggctgtttatgccttggggacattatggactccgagttgttgctgggatctgtagttgcttcgtataacgttgggagttggcttcctcttatgatgtctgagggtgggctcgagggaaaaaaagcaaatgcagccattaaataaaaatgtcccctacatccgcccgtacccgatccggatcccgagcgcgcgagggcggaagtggtggtggcccgcgcggccggaagtccagatcagctgatgggggaggcggctccgcagccgcctagaggccccagccgccgagcgcttcgtcccggccctaagtctcggagactggccaagatcaccgcttgcaccgcgctgttgggcgaggcccggtcccgtctctttcccaggcctgagattctcgcccggcacggccgccctgagcgccccggccacccccagccccggctcgcccctcaggccccgggcctcccctcaacccccggccggcggcccaggccccggatccgcggggggggacccggccccggggggtgcgggccccatggagctgatgtttgcagagtgggaggacggagagcgcttctcattcgaggattcggaccgttttgaggaggattcactctgttccttcatctccgaggccgagagcctctgccagaactggcggggatggcgcaaacagtcagcggggcccaattcccccactggcggcggtggcggaggtggcagtggcggtaccagaatgcgaggtgagagtgagctggggggaagaggagcggcaggccctgcttgggcctcgctcgggagctgtccgggaccaggagctgtccccgaccaagagctctcttcaaccaggggaagaaaggggagctgtccccggccgggagctgtccccgactgggagctgtcccaagcttagaacagacttcagaactcgcttttccggccttcctggggtgggctggcttctccacacctgtgtgtgtgtgggtgtgtgtgtgtgtgtgtgcgcgcgcgcgcgtgcgcgcgctgtgacagggagatcctgtggacagaaagtaaatctttcgtcactcctttgccttagagaggggataagggagaagaatcttgtctttgacttgggaatacttaagtgagttcagtctgaggcataccggaaagtagaggaagagaatgtgggtagggggctgattgtgaagaagtgaccacttgtggcttgtcaccgcattgcaaagtgcattgggagcttcttgcttcggggtgatgatctctgatcccagaagcaccaagaagggatcctacccagaggaaaatagaggtgaactggcctgccagagagtccatagttcataggtttagatcatagactttgcttctggccatgtcaaatatctgtcagaagccaaggctgggacttgcctgctgtgccttcctcatggcacagtttttgtcctggtcctcagtggaagctggcttttttcagcagttgagatgtttaatttgtgtgattctactcaggcctttccaagagtcctgttttccaaactggcttgtggagatttctggtgctcctttgggacagagagaaatttacatatatcactttttttttttttttttgagacggagttttgctcttgttgcccaggctggagtgcaatggcacgatctcggctcaccgcaacctccgcctccccagttcaagcgattctcctgcctcagcctcctgagtagctgggattacaggcatgtgtcaccatgcccggctaatttttgtatttttagtggagaccgggtttctccatgttggtcaggctggtcttgaactcccgaccttaggtgatctgcgcgcctcggcctcccgaagtgctgggattacaggcgtgagccaccgctcccggcatatatatcactttttaggagtggcggactggtggcattcagcttcagttggagagaggatatggcctgtgtacacacacacaaacacacacagatcataggcagttttaccgtgggtcttctgtggccttctggcttctttcatatttgagtatgtgggtggtcttggggcttagtgctccctcactttgagggaagtaactgaagtcatagcgatgaagattgttaacatattggtatcttcctggtcaggttaaaatctgggaaaacatgccatattaccccagtcccccgacttcagtcactgacttgtaaaataaaggggttggccaggtgcggtggctcgtgcctgtaatcccagtactttgggaggccgagtcgggtggatcacttgtggtcaggagtttgagaccagcttggccaacatggtgaaaccccatctctactaaaaatacaaaagattcgctgggtgtgttggcacccgcttgtaatctcagctacttgggaggctgaggtgggaggtaagtttgaacccaggagggagaggttgtggtgagccaagatggcaccattgcactccagcctgggtgacagagtgagacttcatctcaaaataaataaataaaaatcaaaaaaataaaataaaggggttaactcttctaaaaaggttctttttaattctatgattttctgatctattaatgtgactagcaattttgtgagatgtagtttgtcatgttatcactactttttggttaaaacactgtggaaaaccttgagtggtaactttatcttagtccaggtgattccagttgcagcagtagctaggtgccctgcgataactctctccccttgagggtttccagtgtgggaagttgtcatttaggcgcgccaaaagtggtctggcctctcgtgcttcttgagatcccttccgggctctggtctatcttgtctccttagctgggggcctacagtcatctagagtaaaagggatggttaaaaaaaaaaaaaaaaggcaatcggagacaagaatgccagaggagagacattaaccatgtaatttgaatttaaaatgctcatggaatatgggaaattcagtgctgagccatgtgagcagggttacttgctagggtcctggaacgcacctgtctggccaggagtttcttaagatatctctggtatcttctgttctagaccttaggtgtagccggctgtgggctggggattatccagctcccctttcccatatggagccttaagggttagtgtatcctgatagggggatccctaggactttcatccaggtctcttctttctttcatagtgaagatgaggcccaggatgttgtactggcatgagtgccaagagaccatggcccttttcatttcctattctctttcccctgatcccaaccattgtttgcaaagatggactggtgatcccattggtggagctgtcagcaaagcaggtggcatttcatatcccatttgaagtggtggagaaagtttacccaccagtgcctgagcagctacagctccgaattgctttttggagcttccctgagaatgaagaggacattcggtgaggccaaaggactgatggtggggagcggggtcctgatactccacactgtctgctgggtttcccatagaacaaaggagacattgtatttggggcagtggtaagaggaagacaagggagggattgcctgggattccactccctcccccccaccccccgccctggggaaggaatgaggctagggagagagtgcctagggcattgtggtctctgacagggtctgccaaaggttatttgctgagttgtggctgtgtcctcttcttcacccccaggctgtattcgtgcctggccaatggcagtgcggatgagtttcagcgaggggatcagctcttccgcatgcgggctgtgaaggacccattgcagataggtgagtgggccatcatgccatgtggcacatcctgctcctcccatcccctggcttatgaagtaagaacacaccgcaagaagctggagcatgttgtctgaataactgcagggccagggtcaagggcagagacccaggtcctgacagcactccctgaccatgcccccatttctccccagggttccacctgagtgctacagtggtgccacctcagatggtccctcctaaaggggcctacaacgtggctgtgatgtttgaccgctgccgggtcacttcctgcagctgtacctgtggggctggggccaaatggtgcacccacgtcgtggcactctgtctcttccgcatccacaacgtgaggccctcccaatttatcccggccctatcctacactccatcccccccttctctgctgcatgcctggctacaatgtgagccccctcgcctcgcctactctgcctctctgtcccccagctccagctccagcaaacctgttctcagattgttccatttttctctgtgtccccttcaggcttctgcagtctgcctgcgagccccagtctcagagtccctgtcccggctacagagggaccagctgcaaaagtttgctcagtacctcatcagtgagctccctcagcaggtgggtgaggtcggcaccccctcctgcaattagctccgggccaggccgcataacagccttcctgttaggcccaggcctccatgggttcacctaggccgtgttctgcctgcctccgtctctttctccctcagatcctccccacagctcagcgtctcctggacgaactcctgtcttcccagtcaacagccatcaatacagtgtgtggagctccgggtgagtgtggtgagaaagattggcagtaggaagaaagccagcttgtagtacagagcgccatttactcaaggcttgctgttgtcaggcaaatccaggcccctatctctagatgactgactgcctgtcatcctcagaccccacagcagggccctcagcatcggaccagagtacttggtatctggatgaatcgacactcactgacaacatcaaaaagacactgcacaagttctgtggcccctcccctgtggtcttcaggtaaatcggatctctgcatacctgtgtctgtggtggagggggagcgtccctcaggctgatgacagatcctttcttctattcatgcctgtgacccctaccttttattccctgaactggcacagtgcctggcacacagttgtcactaacgaattgatggaagatgatgaccttgtacagtcacagagtggtctgctcttacctagcaagagttccttttcttcttttgatagatcaggaaatggaaacagagaaagattttttaaagagtttttgtggctgggggcggtggctcatacctataatcccagcattttgggaggctgacgtgggcagatcacctgagatcaggagttcgagaccagcctggccaacatggcgaatctccatctctactaaaaaaacaaaaattagccaggcgtggtggcgggcgcctgtaatctcagctacttgggaggctgaggcaggagaattgcttgaacccgggaggtggaggttgcagtgaggtgagatcgcgccattgcactcaagcctgggcgacagagcaagacttggtctcaaaaaaaaaaattttgttacagatgtctttttccctctatcttctgtattttggggccggaagcccttttaggtttcattcagccccgtcttactgtcatggttttctgttcctctgcttttacagtgatgtgaactccatgtatctgtcttccacggagccgccagccgctgctgaatgggcatgtctgctgcgccctctgaggggccgtgagccagagggcgtctggaacctgctaagcattgtgcgggagatgttcaagcggagggacagcaatgctgcccccttgttggaaatcctcactgaccagtgcctcacctatgaacaggtaatcactcagcgttggggagccccgtggtagctcattctttccctccccctgcctcatcctcctcttgctgaaatggactctgggagggctactctgcctttctctgagctctcaggtgcagctcacagccttctttgtctccagataacaggttggtggtatagcgtacgtacctcagcctcacacagcagtgccagtgggcacacgggccgtagcaacgggcagtcagaggtggcagcccatgcctgtgccagcatgtgtgacgagatggtcacactgtggaggctggccgtgctggaccctgcactcagcccccagcggtgagtctcccctgaggctcaccacagaactgagcctgggccagctcaggacagactgagccttcatctccttgtttgcagagacataccatgattttagtcctcgggaaacgggaggtgctgagcactggtgttagcagtgatttacgagtcctttttctgagaggctttcatccttccttcccctaaataacacccacttttcaaaattctccagtgtttcagtgatgcttatggggctgggtcaagaagtactttcctgtatcctttccccatgcctctctttggggtgtacacctactccatgcccatcctttcccagtagcccctcagcagcctcctgccccttgttcccacaggcgccgggaactgtgtacgcagctgcggcagtggcaactgaaggtgattgagaacgtcaagcggggccaacacaagaagacgctggagcggctcttccccggcttccggccagcggtggaggcctgctacttcaactgggaagaggcctacccacttcctggtgtcacctacagcggcactgacaggaagctggcactgtgctgggcccgggccctgccctctcggccaggtgcctcccgctctgggggcctggaggaatcccgggaccggccccgaccccttcctactgagccagctgtgcggcccaaggagcctgggaccaagcgaaagggcttgggtgagggggtcccctcatcacagcggggtccccgccgcctctcagctgaagggggagataaagctctacataagatgggtccaggtgggggcaaagccaaggcactgggtggggctggcagtgggagcaagggctcagcaggtggcggaagcaagcgacggctgagcagcgaagacagctccctggagccagacctggccgagatgagcctggatgacagcagcctggccctgggcgcagaggccagcaccttcgggggattccctgagagccctccaccctgtcctctccacggtggctcccgaggcccttccactttccttcctgagcccccagatacttatgaagaagatggtggtgtgtacttctcggaagggcctgagcctcccacagcctctgttggcccccctggcctactgcctggggatgtctgtacccaggacgacctcccttctacagatgagagtggcaatgggcttcccaaaaccaaagaggcagcccctgcagttggagaggaggatgatgactaccaggcgtactatctgaatgcccaggatggggctgggggcgaggaagagaaggccgagggcggggctggggaggagcacgacctgtttgctgggctgaagccactggaacaggagagtcgcatggaggtgaggggatggaaggagggagggctgggtgctccttagccacaactgggaggggctatctagctctagttgggagtgtcaggaccatcagcaggattgtgagaaccctgttgcaggcgccgaactggtctccctgctttcagtctactcacttttctgcttccacgagattttcctgaaatgtgatggtgtcactctgctgcttaaaacccttcaatgggttcctgttgcccttatgataaaatgaaagtggttggcatgacctgtgagggtccacttgatctggtctttgcctgctttgccagcctcacttggctgctctgtcctttgcactccagtcagctgaatcactcatgtatctgccatgctctctctcttgcctccaggattttggacagattgacctttctgcctggaatgctcttccccattagcccgtgtttctccttcaggtctcagggatcttaaagatcacttcctctagggagtctctctgatactgtccctgtgccccaagatatcccacctgcttccccttgacctttccctgtaatagctggcatcacggtggcatgtgtgtttatgtgtctgtctttctaaccagagctcctatggagcggcacagggcctggcatgtagcaagtgttcaaggaatgttggctgcatgagtgagcatgatgtcctgctcctggaagttgggactttaacctgtctggtcccatgtcctccttccaggtactgtttgcctgtgctgaggccctgcatgcgcatggctatagcagtgaggcctcccgtctcactgtggagcttgcccaggatctgctagccaacccacccgacctcaaggtagagccgccccctgccaaggtgagagacccccttcctctaccttcccctcccccacttacccccaacctgctcccatgccccaccccaagtgagagcatccttctacctccaccaaggtaagtcagaatcatctgcctgtctcctgtgtttcttccctttctagggcaagaagaacaaggtatccacgagccgtcagacctgggtggctaccaacaccctgagcaaggcggccttcctgttgacagtgctaagtgagcgtccagagcaccacaacctggccttccgagttggcatgtttgccttggagctacagaggcctccagcttctaccaaggccttggaggtcagaggctccatctcagccttgtatttcagtctctttagagccttgcaccttgatctctattgacacaccagaggtctgagctccttcctgtgccctcaggtgaagctggcataccaggagtctgaggtggctgccctgctcaagaagatccctctgggtccaagtgagatgagtaccatgcggtgccgggcagaggaacttcgggaggggacactctgtgactatcggcctgtgttgcctctcatgctggccagtttcatctttgacgttctctgtgctccaggtatgatgcctgaccctacagtaagtggggaactggggtaggggtagctttctctaagaaagaccaagagccccaagtttctgaatcacctttaggacccatcaggcagcttcatgggtaggtctgtgatgatgaggattttgggttcccctgtattttttcccatgcatgatacttctgtctgcctgacttaccccaacttttatacagtggtttctcccacaggttcccggcccccaagtcgcaactggaacagcgagacacctggggatgaggagcttggatttgaagcagcagttgctgccttgggtgagtcttgagcatatcaacgagctaagcctggttcaggtcttgaaggacatgagacctgtgccttgttgtgaagggctgtatggtaatgggaaggtcaggatgacatgtgtgagccaactagtgcctgtaagacaggaattcagggcaaaaatgtgtgctatatggctgggcgtggtggcccatgcttgtaatcgcagcgctttgggaggctgaagcaggaggattgtttgagctcaggagttcatgaccagcctgggcaacctagcaagacctcatctctacttaaaaaaaaaaaaaaaaaaaaaaaaaaaattagccaggtgtggtggcacatgccttgtgctgccagctactccagaggctgaagtgggagaattgctttagcctggagattgaggctgcagtgaactgtgattgcaccactgccctctagcctgggcaacagagtgaaaccttgtctcaaacaaagaaaaaaaaaattgtgtgctatgggtattgggtattgtaagggcagcaaaacaaaaatctagagaaaggcctaagggaagtggtagaatatggaatgtgggttaaaagatcagtaggtcctaaaccagcgaacaccatgagtaaatacacaacgcaatcaagttttcatgagaatgaggaggccagcttccctaaaatgataagtacatgctgggtaagcagattggacctggttatgaaggttttgaaaagcacaccagagcttaggctggatataatagtcaacgaagacttctataggtgatgtgggttggaccaagggaaccccttacttcatatgctgatggcttgggaaccctggcctcttacctttgctgtcttgggaattatgactactctcaatccccataaggtcctctttctcgcaggcatgaagacaacagtgagcgaggcagaacatcccctcttatgtgaaggcacacgtcgggagaagggtgacctggcattagcactaatgatcacttacaaggacgaccaggccaagcttaagaaggtaagagactggggctgggtgcggtggctcatgcctgtaatcccagcagtttgggaggcagaggcgggcagatggcttgagcccaggagtttgagacaagcctgggcaacatggcgaaaccccgtctctaccaaaaaatacaaaaaattagcagctgggtgtggtggcacatgcctgtagtcccagctactcgggaggctgaggtgggaggattgcttgaacccagtaggcagaggttgcaatgagctgggttcacgccactgcactccagcctgggtgacagagcaagaccctgtttcaaaaaaaaaaaaaaaaaaaaaaggcaaggtactggggcctttgacaggcagagaaagagagcacattttactacctttctcagggagtttccagtacaatgagaaaagtgctattttaggctgggtgcagtggctcatgcctgtaatctcagcactttgggaagcagaggcgggaggatcgtttgagaccaacctggccaacatagtgagaccctgtctctacaaaaaattagaaaattagccgggcatggtggcgcgcgcctgtagtcccagctactcgggaggctgaggtgggagaattgcttgagcccaggagtttgaggctacagtgagctataatcataccactgcactccagcctgggcaacagagcgagaccctgtctcttaaaaaaaaaagaagaagaagaaaaaaagaaaagtgctcttctgcccataggaggtaagtagggaatcttggggacatctcataaagaataagagaagaccaatggttcttataggagtgcttgggcatggggtggaagaagagaagcagagggcataaagtcattcattcacttatttcagtatttattgactatcagtatattctgccctgtggtgttaatggaggataccaagatatgttggggttaaataagttacaaaaagacatgtaaaccaggaggtcatcctgtggttgtaagtggggaaggctccctgaggatgtagcaattggctgtttcaaggagaaaggaaggtaatagaagtcaggagctaaagggcatcctgtcactgcttctctggaggtcactgcttctgtcttccagatcttagacaaactcttggaccgagagagccagacacataagccacagacgctgagttctttctactcatctagccgcccaaccacagccagccagaggtctccttcaaagcacgggggcccatctgccccaggggccctgcaaccactgacctcaggctctgcagggcctgctcaaccagggagtgtggcaggggctgggccaggccccactgagggcttcacagagaagaatgtgcctggtgaggtgggggcactgggcaggggggatgaatggtgtggacctatgttgaggtcccctttcctgggctcatcccagcgtcctgttttcctcacctagagagttccccacattccccctgtgagggtcttccatctgaggcagctttgaccccaaggccagaagggaaggttcctagccgcttggcacttggcagtcgtggaggctataatggacggggatgggggtccccaggacggcctaagaagaagcacacaggtaggatagcctgtgggctagcatagagggaaggataatcctgaaggttggagtcttaacatctgggactcctgacttctgagactgacttctcttgggggttaggcatggccagcattgacagcagtgcccctgaaacaacatcggatagttcccccaccttaagccggagaccacttcgagggggctgggcccccacctcctggggtcgaggtcaggacagtgacagcattagcagctcttcttcggactccctgggctcctcatcctccagtggaagtcgccgggccagtgccagtggaggagcccgggcgaagactgttgaagttggcaggtcagtgggaagaactccccatcttccctgatctggcccaccctcagagccacacccctagtgcaatccaaccattgtctcccagcatcctcactttccctggtccttcccaacctacccggatgcccatttcaaagaaaccccaacccccgtccctaccccattgccccttcaggtacaagggccgccgccccgagagtcatgcccctcatgtacccaatcagccatcagaggcagctgcacacttctacttcgagctggcgaagacagtgctgatcaaggcagggggcaacagcagcacttccattttcacacatccatcttcctcagggggccaccagggtcctcaccgcaacctgcacctttgcgccttcgagattgggctttatgcccttggcctgcacaactttgtttctcccaactggctctcacgtacttattcttcccacgtttcctggattacaggtaaatcatttgacctgacttgggtatgggagggggattaattggtggggataagacccttatctttgtggggttactgatctgataaaaagacattattctcacaccccagtggtgcccacactaacccaactctgcccttctctcctttcccctaaggccaggccatggagataggcagcgcagccctgactatactggtagaatgctgggatgggcacctgacaccccctgaggttgcatccctggctgacagggcatcacgggcaagagactccaatatggtgagggcggcagcagagctggccctgagctgcctgcctcacgcccatgcattgaaccctaatgagatccagcgggccctggtgcagtgcaaggaacaggtatttctacgggcaatctgggaacctcttctggggcatctgggcagggaggttgggcatgggaaagctaagggcccagctcttgattcccgtatcctggagtttacagatgattgttggtcctctcatggcaacattttacccattaatgtgctttcacacccatctttcctttaccttacaactcaaaggttaggtttatttctattttacagataaggaaatggaggcctacggtttagggaccaagatgatcactcaggatagaaaacttagggaaggcctcatacatctaagacttgaatgggagggggctgttaaattagtttggaactgggactataacctgggtcttgactcattttggtcagtatttactcagtgtgtgaagcactcactgctctgataatggactctaagcattgacactgacctctgatgattccctgggaatgagacagctctgagggagacattggaatctcatctaacaccttccatgtggtaaaggcctttcccccttaacactctgtgcccctctcttccaggacaacctgatgttggagaaggcctgcatggcagtggaagaggcagctaagggtgggggcgtgtaccctgaagtgttgtttgaggttgctcaccagtggttctggctgtatgagcaaactgcaggtggctcatccacagcccgtgaaggggctacaagctgtagtgccagtgggatcagggcaggtggggaagctgggcggggtatgcctgagggtagagggggcccagggactgagccggttacagtggcagcggcagcagtgacagcagcagccacagtggtgcccgtcatatcggtggggtctagtttatacccgggtccaggactggggcatggccactcccctggcctgcacccctacactgctctacagccccacctgccctgtagccctcagtatctcactcacccagctcaccctgcccaccccatgcctcacatgccccggcctgccgtcttccctgtgcccagctctgcatacccacaggtgagaccagtgttctgctggggggtaaggcatgggaaaatactgggaattcatagggggttggagtgggtactctgggagtataattggtcagtcggagagtcctggtgaggtggtgggagtctgggggacccagcccaactaaaataagaaatgacggccgggcatggtggctcatgcctgtaatcccagcactttgagaggccgatgtgggtggatcacttgaggtcaggagttcgagaccagcctggccaacatggggaaaccccgtctctactaaaaattagctgagtgcacgcctgtaatcccagcttcttgggaggctgagatgggaatcacttgaacctgggaggcagaggttgcagtgagccgatatcgtgccactgcactccagcctggaggacagagcgagactctatctcaaaaaaaacatgtcaggatagcagcttgtgggggtgaagcacgacagcaacatcctaatcaagtttggcatcttcccctttcttctccctgcccctagggtgtgcatcctgcattcctaggggctcagtacccttattcagtgactcctccctcacttgctgccactgctgtgtctttccccgttccttccatggcacccatcacagtacatccctaccacacagagccagggcttccactgcccaccagtgtggcctgtgagttgtggggccagggaacaggtgaatggaggggaggcacactgggcaggggaggtggggagggaatgttctttgtctctctttgggctctgagttcctcacatggctctcaccccacttagtgagcagtgtccatccagcatccacgtttccagccatccaaggtgcctcactgcctgccctgaccacacagcccagccctctggtgagcggaggttttccaccgcccgaggaggagacacacagtcagccagtcaatccccacagcctgcaccacctgcatgctgcctaccgtgtcggtgagaggacatccctttctgtgctcctacctgcagttgtgccagtggctcttcagaggacccttcctctagctcttcatttgtttactgtggggtcaggtgacaggttggggtaaagggtgaagaggatacaccgtaccatgtgcccacccttatctatctcccaggaatgctggcactggagatgctgggtcgccgggcacacaacgatcaccccaacaacttctcccgctcccccccctacactgatgatgtcaaatggttgctggggctggcagcaaagctgggtaacacctcccctccctaggaccattgccccccccccacctgctctccccaccttccttatcccagacctccttcctagctcttgctcagagttgaggccttggtcgggtatgtgtgcgtgcgcggggggcggagggttacctcagctcctggggtggagggaggctctctgccaggccagagctgagatctgtaagttgggtccctagggcagaggtggccacccccgtctcatgcccctccccctgccccccaggagtgaactacgtgcaccagttctgtgtgggggcagccaagggggtgctgagcccgtttgtgctgcaggagatcgtcatggagacgctgcagcggctgagtcccgctcatgcccacaaccacctgcgtgccccggccttccaccaactggtgcagcgctgccagcaggcatacatgcaggtgacaacctagaattatggagcagggtggagcacttcctgggtggtcttggaccagagggaggcagggcctgtttctgtgctttgtactaaggctcatcctgcacacatcctcctccagtacatccaccaccgcttgattcacctgactcctgcggactacgacgactttgtgaatgcgatccggagtgcccgcagcgccttctgcctgacgcccatgggcatgatgcagttcaacgacatcctacagaacctcaagcgcagcaaacagaccaaggagctgtggcagcgggtctcactcgagatggccaccttctccccctgagtctttcacccttagggtcctatacagggacccaggcctgtggctatgggggcccctcacacagggggagtgaaacttggctggacagatcatcctcactcagttccctggtagcacagactgacagctgctcttgggctatagcttggggccaagatgtctcacaccctagaagcctagggctgggggagacagccctgtctgggagggggcgttgggtggcctctggtatttatttggcatttataaatatataaactccttttttactctagtcgacctgggcctttcccttctttccaaattccatgtgcagatgaaccttcaactggggaggaaacttctgacacttgctttagtctaggtttttcccactccagggaggcagacaaaacagaaaaataaggatgtttattaaggacatttctagcccacagctagggctcatactcggctctatgagccactgtccgacctcatccccattcaatgtgaatgacattagggaggccgggccacaggtagatcccactgcctggctaaaggggccatagcaaggggtccctcccatgcaaggggtctctcccatagccaggtatagaatagatacactgctgcggatgaagagggaaatctcattggactaatacattcccctacaccctgcctggaccctctcattcctccccacctcccaagatgatgggtcaaaggtacctagcactattatgtggggtaccaaaggaagcccctttatttgtcccagaactgtgggaaaaggatacccttcccttctcagccatctcaggcctgggggctactgaggtagagggggaggggccaggccactctaatcccccttgtgggccctgctctggacctgccccttagggaagcagggggcattttgctggtatgggaggctgggacatcagcccagactggaatgctgcagttcttcccgaagccacgagggcactggctgtccaagccggctcagcagcttcgacaactccaaattatggttccggaaaaaatccgtaaggaaaagacgggactgacaggagaaaatgaaggcagaaatggtaagaagtgggacacagaatcagatcctggaagtggagagggattcccctgcccctggctttacttacctcagtgtccatatctggatacctccggcctttgctccggcctagacagcgagtcttaccaccttcaagtccctggcaccaaaatcccttatcatcatcaaacctgctcaacaggaagaggccatgaggtggcagggaaaagagaaactcaagttccataaatgcacaatgcccttccctgcccacagggacatgtctctccttgtgagacagagtaaatctatgtctctaacagacatggtcaacctgcttccccatttcccatacagtactcctcccctgggtcatgctctcccacctgagggtccgtgtgtagttcagaaagggtgtgatacccaggaacttctggatgctctccattgaggctgctgggttggtacgcagctcttgcccatccacaatcagcaactaaaaggacagggatgtggttccctctatattcctaagaagcctctgggctgaagggaagaagaggggaaggggaaccccactgagggctcttgtggggattatacctgtccagaggggtagtaagtcagccagcgttgtagatgggtagaatagtagccagggacaagacagcggttctgcagggagcgtagtgccagaggggtctgggaggaggctgaaatcacctgatagaaggtatagttcagagcaactgggtctccatgggctcgctgatgctgaaggacaaagagaaggaaggtgaaggactggtgatttgacagtattctgcccttacgcttggtctggagacagacagcacagcacgggtacccgtccccaaggcactagttaagtttctcaaacctcactcctttctccctctctagcagtcactgtcccctcccccctccccccaacctttagcctgtgtgtccctagcttcaggcagacctggtaccaggagtaggccctgtcagcagggttggtgagcactgtgatgatcttggctcgtggcaggagggcagccccccgccgtggtacaacttcagagtcaaagtaggtggcacttttttcaaataggaaatcagtgctggcattggaaggaacagggaagaaatccatgtacctaggaagtagcacagaagagagagaagcagaaaaatatgcagagtgaagtggccagaagtctgtgctgagggaagctggaatggggtattttgggggaagggagtgttcctctgagaaacattcaaatggggcccagtctcaccagtcaatacccttgtggtaattagggctgttgaagaactgaatctcctcaaatgtgctggggctagggaagctgctagttacagctgggtgcaggctcaggaagaagtgaatagctgtagtccctaaatgggagagaaagaccagcttcaggcagccattgtgggagggaagccagctcaacagcataagcttgaaggaagtgaaaaaataaccactctgggtaggaaaatcccctatggccaaactacaatgataggaggcaagtctgagagaggcccagggaagggctaaaacagtggttctctgctttaactgtgcaccagaatgacttgtgatcttgtaaaaacaccacagatgattctgatatacaaccagggttaggaatcactgcctcaagagactggatcaatgaggggtgggtataaaaggagttcctttttttctctcttaaaaattcaaattaaggccgggtgcggtggctcatgcctgtaatcccagcactttgggaggccaaggcaggcggatcacttgaggtcaagagttcgagaccagcctggccaacatggtgaaaccccgtctctactaaaaatacaaaaattagccaggtgtggtggcacctgcctgtaatcccagctactagggaagctgagcagaattgcctgaacctgggaggtggaggttgtagtgagctgagatcgtgccactgcgctccagcctgggcaaagaagtgagactcttatctcaaaaaaaaaaaaattattaaaattaaaaatacttttttcactcctgtgattacctggagagagaagagagttccttgacaaaaggatcctttgggtttaaggcagggcaagagaagttagctaaggatacttcacctgttttctggggtcccacaatgaggaacttcgggagacgatcacaggttttctccttggaccagatatctttgtgcctcttgtcatcacagggattctgaagccagggccaataatcagataaggcctattttttttttttttttgagacggagtttcgttcttgttgcccaggctggagtgcaatgcatgatctcggctcactgcaacctccgcctcctgggttcaagcaattctcttgcctcagccttctgagtagctgggattataggcaatgtgccaccatgtccggctaattttgtgtttttagtagagacagggtttctccaagttggtcaggttagtctcagactcctgacctcaggtgatctgcctgcctcggcctcccaaagtgctgggattacaggcatgagccaccgtgcccggcctggcctagtcttctcttaaacccccaccccggctgggcgcagtggcttacatatgtaatcccagcactttgggaggctgaggcgggcggatcacctgcagtcaggagttcgagaccagcctgaccaacatggtgaaaccccgtctctactaaaaatacaaaaaattagccgggcgtggtggcgggtgcgtgtaatcccagctactagggaggctgaggcaggagaatcgcttgaacctgggaggtggaggttgcaatgagcagagattgtgccattgtactctagcctgggtgacagagcgagattctgtctcaaaacaacaacaacaacaacaaaaaacaccccacccctatcatgtctctcatcagactgagctccacctttacctgccaaagggggcttcgctcctgagggaaaagttcaaagtacttctgtgcaagtgggacaggaggaagggtctgtaggcgcagccgtgtccaacactggaggaagcgcaccaagctctcaaaggtgtataggcccagccggtcatttccataattggacagatgggtcataaagatgctgatctgtaaggggtacctgcatgtcagatttggagagcctaccccacctctgaattagccttggtgaataaaggtcccagcctgcaaacaccttggctctccaatcttctagccgttcctctcagcaccttaccggattaagcagcactgtcagaaagagctctccacctcggatgctccggtctagttcacgagagcctccaggatactcattatagaagattgtgtgagtgaagaggccacatgtctgccggggcagcacctggagggaaaagaaaaaacagatgagatttgaaagatagaatgagaagtagatggaggacactgggatttatagaggactgagtctgaagttatagcaataaagctcttactgagggtgttaaaattttttcacctttctacccccaattatgtacccccatacttggactggcagttgatagagaacataggtcaatgcatgttgaaagctgtctaaatgttagagtttgattcaagcctgtattgggagtccctcaccataatgccattgtgaatgaagccacggcggtagcgggcagggcggagatggggatactcctcagtgctggtcacctggatgccccacacggatttccaggcctcatagagctgcgtgtggatggggtacacacccgagtggtggggggccacagcataccccaggtccgtgggaatcccatgctcctgggaatggcatagactctcaccaggacctggtgaggtttggggagtagagggtaaagagggtggggaagcctccaaataaagaaaaacgcaaaggataggaaaagggtagcccattaggggaaggtagaaaaggaagcatggctgggagaaattatggggaagagatccaagggtctcaccagagcaaactgtttgttgagcctcatctggtcagccagcacggagcgattgtggaacaggtgtggctgcatgtggctccacatgtgggggaaccaccagaactctttgcggtgcttcagcagcatgtcgtcccctgcatcctcctcctctgtccctatgaccacacgctgaccactgaccacagccagtcagcccctgttccctcctttattttgtaacaacactgaccaccttccatccctgatccttgcctaagactttctatttgccccactgccaacttgccatccagccacccatgcgaacctaaattcatgcccaccactagctcctcacagcagtctgaccccaaaccttgacccttttcttcaacttgtctgcccagggaggtggacagtgaagggacaggtcaaactatgatatgccaaaggagtaggggtataagctcaccagtatgatagaacttgcccgagaagcccaagttgaaggtgaagttgggaactaaggtcctgagtttgttctgggtggtcaacagagcctgggaagagtagcagggacaagagaaatcaggagagcagactgaacaggaaatacatgagaagtagcattcttcctgcctggaaaggcagggagtgtacctatgacaagctcagaatcaaggaagggagtctgacaggccagagtgtgaatagcttctaagaaaaaaatttaagtaacaagactgacctcaacatcagccaccttcatgcgggtcccttccttgcccacaaagatgtcatcgatgtctaccaagatgtagcggtcaaggtccaggcagaggcgcttgccagtgaggtatgcaacagcatcaacgaagataagtttgtggagccagaaggaaaggccatgtccaaagagcacccgctggatgccatcatgaagccccaggtcctgtaccacagtgggaagccgggcccgacgaagaactggtcctggcactgcgggctcagctggccgaaggctggcaagaagcactggttcatatgtactatgattggattggaagatggtccagtcatcaccaggcagtggccctggttctaggcggctggggcgtgtgagatgcagtagcggggcagaaggattcacttggtagtcccggagccccaagtttgagtgtaaaaaaaggggaaagcccttgagctgggcgctcagtaggctgtgctcgtgggctcggaaaaagccaatgatgcccacaccatactccacgcagtaccggtctagcagttcccgactccaggcatccaggttgacatacttgagcaggttctcataaatgaccaagacatagcggccatgggtattatcagtcaatgtgggcatgtcccctcggccaggtgccaactcagtgctataacgaaaacgactagactccaggatggccacaatttcctgccccagctgtgagtatgcactctccacaaacacaaggaccacgggttcagttcgagctgtctctggaggcctggggggccgaggtggaactggaggccgtgcagggccaggaccagctgccccaccgctgctgcagtctcccaagggcaggggcaagggttccttggccttagggctggtggacacataataagccaggaagcccatggagcccaggctgaaagcgatcagcagcagtatgaggcggtgcagttccagctgccgagctgggcgtaccaccttccacaactggagcatggcggggggaggaagggagggaggaatggggaccacctcaggggatgggaggtaggagttctataggctaggactgtcttggaagggtagaaggataggaaaataggggacagggattcccttggggagtttcctttacgaggtggagacgagtccccttagcatagggtaggggaggtagaaggggaagcagggggcaactatacagagtccacttgtctcaggtcaccatggccccctggcccatggcttcaggctgcaaatcttgccaggctctccccttggccctggctgagcgcctcacatcaaaggtcagcaaagttcaatctcttcccctctacctgtaagacagagaaatcagtgggttactcctccctctgaaattgtcattaatccattctcctccccatcccatctctcttacctcctgcttactggataatctgttctcaaaaaaaaaaaaaaaaaagtttcctctaggagaatctacaagctgagtcctataccttagcttcacagcttgttccctttccctttcttagaatacccaaatgaatgtccaaattctcctctctaagcaaagctcagagatggagcagtatatgcaaatgataggaacaaatctcccatcaacaagaggctaaatatcctagaaggctaaaaacaggcctgctctgaaaggagttcctagcccatgaccgagcagctggcagccagcaacagctctgatctttctgtgaggaagggacggaaagccccggaagtcttcagaagtcccatgctccaacaaaatatcagataaggaactcatgagtctgttaatcttctcatcaatcaaacccaatatcacagccaacagctttaacgaacttgcagtcaggtggacactatggtgggggagttcaaaaggaaagagcaatcctcatgataggtaatcattctaccagtttccaaacccagaaattagggactcccttacccgttgcttgtgaaacattacctgcccctgaccttcacctcaactttgccagtcaggagataaaaatgtaacccctgagcaggccacacactgggtgctgagaaaagccatacagctgagtccactctacttctccttcctaacttagcctaagtagttctacaaccctattcctaaacagctcagaagagtccctgagctagtctggagagacatgaggtattgagtccagttacacaaacagaacaacttgagtaaggactggatgacagagagcaacaggagcttaagtcacatccaaccaatgacagaaggaaaaaggacagtgtgatcagaaaacagttttaaggaggtctaattttggggatctcttttattatttttagatggagtcttgctctgtcacccaggatacagtgtgctagtgtgatcatagcctactgcagcttcaaactcctgggctcaagtgatcctcccacctcagcctcccatgtagctgggactacagctttgcaccaccacaccctactaatttttaattttttttagagatgggggtcttgttacgttgcccaggctggtcttgaactcctggggtcagacagacaatcctccggcctcagcctcctgagtctgttctttttcttaaatcgactgcttctgtaagctttattgtcactatccccactcagcctccttgtaaggctggcaatccctctctaccacccacccccaaacacacatctcaggggtgataaggcagagctgaggtccttcagaattgacagagatgatttaaaaacagttcaggacaggcgtggtgcctcacgcctgtaattccagcactgtgaaaggccgaagcgggtgatcacttgaggtcaggagttcgagaccagcctggccaacatggtgaagccccgtctctactaaaaatacaaaaattagatgggcatggtggtgggcgcctgtagtcccagctactcaggaggctgaggcaggagaatcacttgaacgtgggaggcggaaattgcagtgagctgagattgtgccactgtactccagcctgggtgacagagctagactccagctcaaaaaaaaataaaaataaaaataaaaataaaacagttcagctttggcctaggtaaaacgacacgagaagacagctgggggagaggatcaaaatggtgacgggaaggggtgaatgctaagaatgtgatgcaactttagagaaaacattgtagtgaggaggtcactgacgggaagttgatactcagggtgtatcatcccgtatttgagaaattacaacttgccagccattcttctaagagcttcacatatatttaatcttcacaccagccctaagaggtagggaaaaggtacatgctccattatccccatttcacatatgagtaactcagagaagcttagaaccttgcccaggatcacacagctcagttggtgggagggctgggattcgacgtcaggcctgtcaagctccagagccgcgttcttagccgctgcattttagcttcatacctggaagaagcagcaaggtttagggaaggggcgccgggagcgccgcaggccgggccagtgaacactgagggccagcagggctgggcggggtgggtgtgtgcgggagatctctgaggacggcgaagccagacgggggccggggccgggcccgggcttggggaggccgggacggccggagcagcggcgcggaggctgcgggcgccgagggggcccggggctggcgggtggaggggccccgccgagaggagacgggggcacaggtggatgcgaagagcgcaccggatgtgggacaccaaaggggaaggggccacaggcgcgcggcggcgactccggggtgacatcgagacagcctctgggctgggagagccctgcgggaagaagggagcccgcccggtccggaggggagcgaggcggttctgagggaggccggcggaaaggacccggggcgcggcgcacgctgggccgcccgggacgaccctgcgggtggtgatggtggcaacatccaagggagtctgttgggggggcctgagcgcgaccgtgggcgggggggtctcctcaggggcggctcacccggaggactgggcggcgtccccgctgtccccgggctccgccgcgtcccggggctgcccggcttccctgctttcggggccacgggccgcgtcgcggctgctccgccatctccgagcgaacgctctgccgcagcctggcccaaccaccgctcccaccgggggaggcggcgcgccgccgctggtggcacccgctcggatccaccggctccggccctagcagccgcgcgacctgggttccgggaaatcaagcggccctccgcagtgccgggccgagccgcggcctccgagacggcgggctccgcgccccgcccgcggaagcgcaccccctcctctccgcgcgatggcactgccggccgagcgtcggggaccacgacttcggagcaggggcgggctcaggcctgggctcatccactcagccccgcggagggggagccgggccggcccactcgggggaggggaggagtaagaggcggagcggcctaaccggaggcgggaccaggggcggggcgaggccctcagccggctcccagggcactcaccctccctccccgccccgcgtcgcctgcgcagcaccgagcgctgtttggaggctgtttatgagaagttttttttttttttttttttttttttttttttttttgagacggagtctcactctgtcgcctgggctggagtgcagtggcgcgacctcggctcactgcaacctccccctcccaggttcaagcgattctcctgcctcagccttccgagcagctgggattacaggcgcccgccactatgcccagctaaattttttgtattttttagtagagacggggtttcaccatattagccaggctggtctcgaactcctgacctcgtgattcgcccgcgtcggcctcccaaagtactgggattacaggcatgaggaagttttattctcaaaagtacccaaagggagtaggaggaggtactctctccaacctggtaagccaggctgctaaaatctacgcctctggccgtaaacctccaacagcagtaacacaatggactgtttaaaggttattttattaaatattttcagttcaaggtttcattgtaacaaagctatgaagggtctaccaacattcagaacaaacactatttttaaattatttctatgttgtcatgcaaaaattctgcatcaaatgccttccgtttcttgtttaaaaggtgattttttaatagtctattgtctatagatgctgacattagccccagaagaggagtaagaatgctaagaagtggggctggagcagccatatgaagctatgggtctcaatgaattctaagaccatttgtcttcaagccagcaaaacgaaaccctgtggtgaagggatttgcgtgctggcactgcagactgcagggcaggaaagggctagggcccaggggctgggacatgcatgaggtgctcggaggagcctggctaaatccaagcaccagcacctgtgagtctgctctcttctcagctggctcccaagtaaacctgtagctttgcctcttctcccagctctcgtgcctcctgaaggtagtccagggaactggaatctacccacctttcccccaaaagtggagatgtttgtgcagataaatctgcagcgttgttttgagggaaaccaaggccatgaccaattgctcctccattatcttctttgctatctgcttagggtatagatctcttcctcctggaatggaactccttgagcacagagagggacaatgaaggtagaagccttggctctggacacctcttttgggttacatgcggggaggggtgatgcccatgcagattgtccagcagtaagtctatacttcagttggtcagtaaagaggcctctgtaaggacacctcttcttcttgccagagcagtcaggtcaatctcaaagacaggaaaagagatggacgtgcagcaaggaagaataagaagggaggcagccccaaaggcagcctgaatgcatagaaacgaccaccacctcttctcccactgcctcactcctcccatcccacaggggcacttggcagagggcccaggcccagatgagggtcagcatggggaccactaccgtgaaaaggcaagacaaagatggtccagatcagcacagaaacagaaccgccaaaggcggcacgggagccctgaccagggcctggctctctccttgccaggttagaagaaaacacgaagcaaagcagcaacaacccctccccctcctagctgcagggataaggcctcaatattagggcccacatgcattgtgcatcctatagaaatggatgagtgagtgcatgtcagactaacacgaggtttctcatcggcttcatggcgggtacacttctgcagcaccaattctcttcccttctacactaaacaagacagtacagcaacgtccgggctctcagtcctgaggccaccacttctcagctgcctccacagcaggctgggagctctgcgttctctcccaagtaggtctgatggtcacgatgttctcatcagccccattctaggcgcctatgcaagttccaaagaagttcattcctagacctggggtaagcaggccacctcaggagctgcaatcacatcacggcccccaaagctctgtcagagttcttgcctggtccccctaagtccatggggaccagagaggccaagctcacctcttcaaggccggtgggtgagccactgctcatgccaggatggacctcatacatactcctgccttcttgccaacccaagggctgtcggtggttttaaaacgcatcatggtatggattccttttttttttaaacaatctttttttcttttttttttttcttaaatgtaaaaaacacctcggtacagcagagacagacacgaagggcgggcgggagggctgcatgcaggggcgtgcattggctgctgccgcttttgtaattgaattgttttaaacctcaaacaaacaggactgccgctgtcactcaggccctccagagccactggctgcgaaggttggacctccggctggaatctcctaaagcccctgtcaaacaggacagaatgtggtaacagaacagaggacaatgagcacacagatgagttccagcgactttagcacgctaaacacatggccaagtcggcctgagaaggtggggaaagtgggtgaagctaatgcttaaatacaaaactgcctcccatttgctaagcactaactaagtgctttacttatagtatcttacttaatcctcacaatgattaaatgaggtaggcaccactctctgcctttctttgacagctaaggaaacagtttagggaggggaagtaacctgtctgaggtcatccaatttggagtcacggagccagaccctagtctgtctgatttccaagcataacttattgcaaccattctgccaggctttgccagtcctctgggacggcccacacctcctctcccaggaccacctcccagccttctcttcttcctctgaccccacctatcccaggcccttccagcccctctcccccgtcaaccaggtgcacctgtggctgagctcactgcagcggtgcggcaggggcccctgagcagtgatagtggacattgagccacttgccatcccgacggtgccagacccgggtctcttctgactggctggtgcgaggccgaccctgcccgtcgatgtactgggtgaggcggatgtaggcgatgcacgctgcgtcctccccaatcacgtggacgtgtgggtttaggatggtggtatggataggcttgctgttcttggacaggactgcagggcagggtggggtaggtaagaggacatcaggcctgggcacctgcattttcctcccagcctgcacttccaagtcttaccatctcccaagcaaccactcccagaatctccaagtaccgcccccccccacccccgaacccctgaacgccctccagaggccaggatgccacattacattagtctcctttatccaaaaggaacagaaagatgggtaacagtgacagtacctgctgcgcttttaatcaggcattgtgctggggttttacatgcccgagctgtatttcttggtggataatattttcttcattataagatgaggaaataggctcaaggaataatttgctcaaatcacacacctgaactcaggaccatgtgactcttaactaaagcctatagattttctattctgttaggctgagtttagatttcataaggcttggctcacccctagctagggctgcagaacaaaatcatgaacttaaaccattcaaaattgatttgtaattttttttaaggcaccaaagctgaaatagaatcatcaaagcaccaagctcaggatattcccaggattctctggggaaaaggcaaaagaagttggattgccattatcagcatatgctgtgaaaactgtgttgcttttattgagattcacattttagttcaattcaaatgttagacaggggctacatgacaccttcctagtactaatataaactctggaattgcttctggctaatagaattacttagataacagagagtttatatatgtagctgagatgtgataagggtgggagccagcggagaagttagtgactaactataactcagggcaggatagggaaggcccagcataaagtgggaagagataaaaataaggaaggggagggtctcatagagcagagagaaagatgggagggggtgatgattcagcttcttatccccttattttccatgaactgtccagaatgtacaccccaccccctatacaagacgtctgccttcctccatagtcaggaagattctagccacaacttccgatctcgcaaatcaccaacagtgccctggtttgcacattcttatcctggttttaatttcctctattgtgaaacctgcagacacagagcttagttcttatgtgctgagatcatctcaacctaatctcaaagggtttccttccaatccgtcttggaaagaggtgaggcttaaataattttttctttttttttgagatggagtcttgctctgttgcccaggctggagtgcagtggcctgatcttggctcactgcaagctctgcctcccaggttcacatcattctcctgcctcagccacccgagtagctgggactacaggcaccgccaccacgcccggctaattttttgtatttttagtagagatggggtttcaccgtgttagccaggatggcctcgatctcctgacctcgtgatccgccagcctcagcctcccaaagtgttgggattacaggcgtaagccaccgcgcccggcaagaaataagtgagcttgattgtggtgactggcactgccacaaagcagctgcagaatgaatggcacttggagctcaggagcagggccttcaaaggtgcctgtctacaaccatcggggcacaaggggacaagcatacagagtaggagtgcagcacgaaggtcaaataagggaaaagtgggcaactgggatgagaaggtgagcaggagacagagacaaaggggtaaaggggcaggcaggagtatatcagcagcacgaacccactcacgattctcaaagtaaaacttatggaaatccatcccctccacgaggttaccaagggcctcaggctcaaaggaagtgaggcctggatcacaaatcttcctacagggagaaaaaaaaaagcagcctatcaggcttctatggagtgacttgtcttccttccttatcagcggtgtctatccagtagcagcaggctacctgtggccatgccagacaagacagcaaagatcttccaggcctgcctgctgagccactcagccctgtgctttcggcccactgccaggataccatgggtgagctcagggaatctacctggaagggctcccagtttaggagagggcttaactcagatactttgcccaaggtccaacctccctttccccagggtcctaattgttgtctggaagcagggaaggccttgggagatgacttaggtcacaaaaaaaaatgggtctctacttacgtgtaggcctcaaagtccccattgttgatggcttcaatcagctgttctgtaatcttaatgatctcctgttttcgcactgtgggggagaaaaatccatcaatttacctactggggaacctcccaagttacagagagccctccccagtcctcaggagtcccctgtgatcgcttatgacaaagacatccctcttctctgtctctagggcccttggcaggaagagcgaacacaccttccctcccgtctccctctctgcagtctgcagagacaatgaccactttctcctgaagcccagccattagttatggttctttggcctttgcctccctttccatcaacaaccaggttgcagaaaacacgcttgcctttaacaggtgaggagcctggtacatcgtgaatgctgtgagcccctcccctgtatgagcagcctctctcacaagcatctcccaataaggccgcttccacccccaatttacttctctcacctgaaggggctcagtcaggtctcaatcaccacccccactcgtagccctcattcagtggccaggacccagccctgggtgacaggtagcctgacagcagaatccagctagggctggggtgccaaaggaccatcagaaccctaggatggatgcttcccactgctcaactccacagggcttttctgggagaaatgatcccagaactgtaaaaacttgggacagcctgtaccagagaggctgctccatttacctctcgaggcttgggaaagctgcacatttcacaccagctctcattgccaggacgtgttcctcaggaaaaccagacagggctcagactgacaggcaggcagaggtggtgccctccagaggcctcctccccaacccatccaaagccaagggacagctggtgatgtcctgccggcatgggcttctcttatagggaatgccactaccagcaggggctgccaccagggtaagggagagcttgggttgagcttgggctcatcctaacccgagccctgggcggggccaggccacaaccctttcctcacaggagcaaaaggctgcaagacaactgcaagcgttagaacagcaccaccacggcccagccgggccagcacagccaagcagcacagttgggacagggcagcgcagccaaaggcacatccaggagggggccccacagccgtcagccccgctaggccacagctccaggtgagcaagcagcaggttaagggaagcaaggagttcgatcggcttccaaaagcagcaggcaggtgtgcacccacaacacacacaccctctccaaccccaccagacccatctggatgacctgactggggccccacgggcgaagagggttgtgcttagaaactctgcaaggatagatggtgggaggaaaagcagcagacaaaggcatcctccagcacagacgtaactagaaatatgaggatgagctactgataacccatcgaggcaccgtatcaagacttcctactgccttgtcttttatctaacaaggctctgaggtgcgtgccattttatttccacattacagataaggaacctgcagctctgggaggttaaacttcacactcttgaaggcagtgtagctgggatttaaactcagatctatcttgcctctgaccccatgctcttaatactgttatgctgagactcaggaagcactacatccccaacacagttcctcgctgtcacgatttccccatcatcccactcccacccccacagacctgacttccgactctgcccttcttcctggctcagcgctgaggcaaggcccactgcacatcctgggggctttctactcccctcatcccaggccatgtttttccacccacacttctcatatttctttgggccccagactcaggggcccctgcctggtctcaacagcacctccagtctaccccccacccccagcagaggccatgctcccagagcttactaccacgggcaggtgggtgggactgacagctgtggtgggggtccctgaggggcttcaggacgagccagggagacggaagccagaatgtgcctccctcacacttactggctgaggagcagagagaaggctggggctgcatgcctgcagagggggctgttctgtcccgggagctccgtccttcaggcaccgagctgccattcccagtgcggagcggggcagctagccagccagggcagggcagggcagggcaaggcagagcagccaaaacaaacagaacaaggcaggtgagcgagcaagccagacaggccccgagcccatggcgctgcagagccggggcaaggggacgcctcgcctcaggctgctgtggacactggacgacatcccacgccgccgcctctgccagagaggcctcccagctgagggcaccaggcaggtgcccagacctgggctgtggcttccagacgagccttacaacagcctgtccaaggacccctgatcccggggaagatgttccagggggccaggccacagggtccagagcccagcagtgacagcgcctcctatgttgccagcagtgccggaatcaaaactgatctgacctcactcacaggggcctggagctactatgattcacttcctcgcagctttctgctattttttttggttccaaaaggtttggtgcccccttgccacccagggcatgctctcccagctctgtcctagagtgttcctctgtcttttctgatgtcctggcccaaggtcacttactgaattcaggcaaagggagcaattccaggaggcccaatcaaagagcaggacagagattcccgggggtccagcctgccatgccctcccaccgccctggcactctagccaggcccaagcttaggctagtggtccttacgggcccaccaggacatgaccaaatgtggcctcacggttgtcagattagttccaactccatcattcaggccaaaatcttaggactagagtgaccaactcatcccagtgttcccaggactatctgggttttatatttatatatatatatatatatatatatatatttttttttttttttttttcttgagacagagtctcgctctgtcacccaggctggagtgcagtggtgcaatctcagctcactgcaacctccacctcccgggttcaagccattttcatgcctcagtctcccgagtagctgggattacaggaccccgccaccacacccggctaattttttttttttttttttttttttttgagaagaagtttcgctcttgttgcccaggctggagtgcaatggggtgatctcggctcactgcaacctccacctcccaggttcaagcgattctcccacctccgcctcccgagtagctacgattacaggcacctgccaccacacctggctaattttttatatttttagtagagatggagtttcaccatgttggccaggctggtcttgaacttctgaccttcaggtgatccacccaccttggcctcccaaagtgttgggattacaggcgtgagccactacgcccggcctttttttgtatttttagtagagacggggtttcatcatgttggccaggctggttttgaactcctgacctcaagtgatccacttgcctcggcctcccaaagtgtggggattacaggtgtgagtcaccgcacctggcctatttatttgttcctaattttttttttttaatagagacaaggtcttgctatgttgcccaagcttgtctcaaactcctggtctcaagcaatccttctgccctggccctcccaaagttctgggtattacaggtgtgagccagcactcctggcccatcacagtcttaaaaccaaaagttctgtgtccgaggaaaaccaggagtgattggtcactctatttatgactcatagcacttacaggctacttcggcagggacttggggtacccctgttcttggatggcacatcattatcagcaacaggaacagttctctgagccctggcccctggagaatctctagcttagctattttagacttggggtcaaagaagagaagcctcttgcccaactcagcaacaccagacaggggcctcatatcttggctcgtggaaagtagcttttataccaagccctctcctaggggcataggagccagcattcccagttctggggacagaaaaggcaggtgccccattggagcccaggtacctgggtcactgctggagtccttccccctccaagggccagcacctacctttgaggtcctcatcttctgtggtggtgttgcagctctctgtggagccctgtaggccaaaaagaacatgtttctatatgctccatcccttggaagccagaggagcaaagcagaacaaaagcagagtttctgctcctacaagaggtgcaaggaggaattgtggaaggttctgcttccaccctggctgtctgactcttcccaaatcccctccctagtcttcccccagttggtaaatgccaccatctacccagttactcaggctaaaacctggagtcatcctcaatccttctctttctctttttcccttatattcagatcgcccaatctaaaataaaatcttctggttctgcctccaaagtaaaccccatgtcttacctcttcacttccaatgcacagctacaacctgactccaggccaccagcatctcacacctgaaccatgataacagcttcatggtctccctaacttccacacttacctcctccctagagtttttcttttttgaaacagagttttgctcttgttgcacaggctggagtgcaatggcatgatctcggctcactgcaacctctgcctcccgggttcaagtgattctcctgtctcagcctcctgagtagctgggattacaggtgcctgccaccatgcctggctaatttttgtatttttattagagatggggtttcatcatgttggccaggctggtctcgagctcctgacctttgctgatccactcgcctcggccttccaaagtgcagggattacgggcgtgagccaccacgcccgggcctccctagagttcttgatcatgaggccagagtggtgttttaaagtgtcaactagattctgttactcctgctaagaactcccaatagcttctccttgctgctggaagaaaatgcaaactcctacaagggcctctgtagcaggccctgctgcttctccaacctcatcactctcctatggttctccccgtctcactttgctcttccctctgcttgattacaaaggccacatctgagcttcagttccttctgcttagggcactcagcctcagagctggcctggctgcctccttcccacccaccattcagtttctagctcagatatcacctcctgaaagaagccctctcctgactacttaattcaaggccctgttctctctgtctagtttggtgaggtttttctgtttttcattttttagatggagtcttgctctgtcgcccaggctgaagtgcagtggcacgatttcagctcactgcaacctccgcctcccaggttcaagcgattctcctgcctcagcctcccaggtagctgggattacaggcatgtgccaccatccccaggtaatttctgtatctttagtagagatggggttttgccatgttggccaggctggttttgaactcctgacctcaagtgatccgcccgccttggcctcccaaagtgctaggattacaggcatgagccaccgcacctggccctctctctactttctgccattttcttcagattacctattgacattagattttatcttatttattttttttgagagattaagtctcactgcgtagcccaagctggagtgcagtggcgtgatctcagctcactgcaacctccacctcccaggctcaagcaattatcgtgcctcagcctcccaagtagctgggactacaggcacgcgccaccacacctgcctacttttttgtattttagtagagacagggtttcaccatgttgcccaaggtggtctctaactcctgagctcaggcgatctgcgcaccttggcctcccaaagtgtgaggattacaggtgtgagccacggtgcccagcttatcttatctgtttgcttattggttttttatctgcctcccatcccacccaccgtttgaacagataatttgtcttgtcacctctgtaagccagagccatggatggtatctgggcttaacagatgttcaggaatgctggtgaaaacatcaagggcacaaaggggtcaggccatggagaacgctccagggtctggagatactcttgcctattttttcagtgaacgtttactctcatttaaacttccgacatatggaggaagattctattattatcatccccaatttgcagataaaggatactaaggtgcagggccaggattcagaccaggtctgtctgactgcaaagcctgagctctgtaaggtataatgcccttcctcagcatggagcaactgtgggcacaggctaccttcagctgagcctctgcaaacaccttggcctcagggtgcagcctgtagacccctgggacccagcccacctgtctcctgctgacctggaaagcaggaggcaggctcaggagccactcaccttgatcccatctgtagcgttgtgtaccacagtggtttgtggctcctgtgagagaagatgaagattacccttccgacttggggacagactatggctcttccctgaggagccccacctgcaccccaggacccccgcagaccctatgatgaccactgaggcctgcccaccagccatctccagaagacaaaatatcccggctcaactggggtcccgggcagctgggatagccctggattttggcagcagcactgggctggtaagaaagagaggcctggcaggtgcaggtgcccaggaggctgacagcaagggcctctgtccctgattcctgtcagttctgagggctctttccacatggggttcccacggggcaggtacactagaggagctgtgggactgagggcacaggccgggccccgcccacagcgttcatcacggggaatgtgtgaggcaggaacatgggcagaagaatgaggtctcccagaaagagccaggacaggaggccccctcagcaagctgagcccagagagctgcccactgcgcccgccttctgccttccctagttcctggccccacgccgccacgtcatgtggtatgagggtccgcaaggaggggagtagcaggcaacatcacctctccctctttcccagtcacccccctgctgactctctagttagccaccactagcagagggacctccaagagcacacagaacccctggaggagcccagagagaacttagccagcatgaggcactccaggagcctggagacctcagcaccatccagaggtggggaccccagccctctttcctgtttctggctttgcaaaggagaggctgaggcaggttttacaagggggcctccaagaactgatgttcaggtcccaagaaagctcctaccctctcctttcctaagcaactcaccttcccagcccccacagcagacccactaggggtcctgggctgggcctgggaggttcagctgagagccctgatcactcttccccccaccagcgaaaggagcaggagcaggagcagcacttctgccatgcgggatggagcgcggccaggcgggacaatgaaggggaaggggcatacagggcggcacacaaagcagtcagttctatggggaccaagaaaggaacaggccaggaggccagggagggggcacaagaggaggaagagggaaggggcaggaggcagccagggtcagaggcggagaagctgtagtcaggaggtaccatggccgtctgcaagggcgcgggctcttgggctgggcttacgagactgtttttgttgttgctctgtggctgagacaagaaaacagatggtttagttcctccagagtccccaaggccactcaggttcaactcccagacctcccttgccccctggtctggcctggaggaggtaggcctgaggtggcctccataacgctgtgtagatgggagcgatggctagagagatgatcagaggaagtatttgtggggcccagagacctagctctgggggcaccctcaaggtgggaccagcccaaagccttgttttaaagcatccctccagaaatctctgcttatgccaggtgccaggtcattgcaaaatccacacctgacccaaagaagttcaagatcttcttcccactgtacaggaaaaaggggggtagtttataagaaagcagaacaaaattcagaaactctggtcccctatctgtgggcagtctcctgctgcactttcaacccagcacctgtatttccttcttacaacaccagctcgaagcctgaaacaaagaggaaggagaaaagaaaagtatgcctggcctaagagatggtgtccagaggatgggggtggaagtccctttcagacacaaaatgcattcactgacctcagggagcagagtcaggactgtgctgttcacctttttgtctgacaaatcttaggcctgatcagctagaagggcagtgttccggggaggggcaggtgaaacccagcggggctgtagctgtagtcccagaatccagcccccaggacagagtaggccacacacaggccaacattcccaacagcaccatgaccaccagggatatctccttgcctttcaaaactacatggtggtgggtgggcacggtggctcacacctgtaatctcagcactttgggaggccaaggcgggtggatcacctgaggtcaggagttcaagaccagcctggccaacatggtgaaaccccgtctctactaaaaatacaaaaattagccgggcatggtggcacatgcctgtaatcccagctactcgggaggctgagacaagagaattgcttgaacctgggaggcagagattgcagtgagccaagattgcaccactgcactccagcctgggcaacagagcaagactccatctcaaaaaaccaaaagcaaacgaacaaacaaaaacattacacggaggggcacagcaagggaggggcaaggggaagatggaagaaaggaagaaggctgatctccagggcagggagccatatccatgtgatgttctttgcctctgatagttccctaaccagcgtactccatctcactgagttccagtggggttgggggccactgaggagcagcctgatgcctgcaagttcttcaataggcagtgagacaaatgtgtggctaccatccctgcacagggcacagatgatacatcgacagctagaatgtgtgtcttctctcctaggacatacacagaaagcatcctgactgtcctacttcttgcctggaggcctcttggaccagacctgaagccgtccaccgccagcttgctgtcaatggctcagacatccccaaacccagggctaggcatggaacctcaagccaggcaccaagtgactccactgaacaagactccacagactgcgacaggctagagaagagggggcccaggagtagtgagacggtgggtctaaactcacgggagctctgctgtctctcattcccaccaagaagcaaagcccacctagctcagtgaatgatgctgacctgttcggggttggttagagagggctgccctacctgtaaatcccagctgaggccaagaccctcacagggggcaaggactccagggtgcccacaaaacctgcagagggctgggatgtcacccaagtggccccacctctggtttatttattttttgagacggagtctagctctgtcgcccaggctggagcgcagtggcgcgatctcggctcactgcaagctccgcctcctgggttcacgccattctcctgcctcagcctcctgagtagctgggactacaggcgcccaccaccacacctggctaattttttgcatttttagtagagacagggtttcaccgtgttatggtcttgatctcctgaccttgtgatccacccgcctcggcctcccaaagtgctaggattacaggcgtgagccatcgcgcccggcccccacctctggttttaatggatggtttcataatgactcaggctgctgtgttgcccttggtgcccagtgtcccgtgagaaagatgagttagctgtcccccgagggctgggtgggcagaataaaccactgggcacagctagagagaatgggatttgcacgggggcagagccaggagagcgagactcacaagtgggagcctgcaaccagctcctctgcccaccacacagttgccctccagctgccagtctgtaggaagcagctcctcatgcctgggaagcagggcctctccttctgggtgacaagagagtgagggtctctcccttgcttgccccaagtccctaccagcttcacatcctaccctgggtcgctggggtctgtccaagctccacagcagggggtgccgtaccaccccttccaatgtccactttttaggctactgggtgaccttgggcaatggcccccgcctggcaggacaggccacacctgcccacacagcacagacatgcagtgaggatgagtgaggcacacgcacgtggcagaacaggtttgcgtggctggcaggcgggcacaggcagcatggagtgggcgatgggtgggcaggcaaggctcaccattaggtgcacgctggaactcgacttccttttctggacacaccacagcaagagggaaagagaaggggaaagaggaggtaagaagagaagcacagagacgctgcaggttagcgcaccagtgtgggctctgcatcagggagaaaagagcggagggagacccggagtccagcaccagagggttaaacagcacacggaccgacaggcactcacaccctccagaccctgggagggaagaactcttttgtggtcaggttcatagacacagatttagtatcttctgagatgtctcagccttgctcaaaaaaagcctcttaaggagattaagacacaagtctgtgaggttaagtatcattttgctacaaatttacaggtctgggttcatagggttagctcaccctgtaatgttatttattttctctcattactagaactgtctgaaattcaagtgagcagccaccagggaaaaagcaaaagctactacaggctctcctcagctctaataaaatttgacttctgacttcgctgcatccctactatgctttttacataaagatgctgagcttttgaaaatcacctagcagttaaatgttggccttcctttgtcagtatagccatgcttgtttacaatatttgaattttttattgcattttgcaattcgtggaaaatagaaacacaggagtgccagtgattaaaactacagtgatcataaaaatgcagggatgtaagccacagggaatgttgaaagcagtgattcctcagcctcaactagatgctcacgaactttacgttcacatgtgaaacagacgcatcaagatgaagaccacgtggaacactgaaaatatatcccagaagactgtgtctaaaaaatgaagggtaattatcaatgtcatcattagctcactgggggtaaggtccccctgtaatatgtccgtctgtcgttcaacttttgcacattcatttaacaatgcccagcaaacactgagggctgtttcaggtaaacacagctgataaactgctcctgccctcaagcggccagcattctttagaaggcattttcagggattattattataatcaacgaaagaggctacaaatattgacaatggtccataatttagaattagatttaaaggaaaagaaaaacctaaatatagttaggcctcttttacattggccttttatttatttatttatttatttatttatttatttatttatttatttttagggagtctcactctgttgcccaggctggagtgcagtggcaccatctcggctcactgcaacctccgcctccctggttcaagcaattctcctgccttagcctcctgagtggctgggattacaggcgcccgccaccacgccccactgatttttttttgtatttttagtagagagactggtttcgccatgttggccaggctggtctcgaattcctgacctcaggtgatccacctacctcggcctcccaaagtgctgggattacaagcgtgagccaccgcacacagccttacagtggccttttaaatatgctcaaatatgatattttacttcgaaaatcatccctcaaaaagaaggagttcccttatattcatatatataagtagtggggtgtgtgtgtgtgtgtgtgtgtgtgtgtgtgtgtatatctccttatccctttacccaactaaagtgttactgctttcaggaaggttcctatcttatgtgtctttacaatttccacagtacctagcaacatgccttatagttagcatacaggcgacgaaagtttgctgagttgagctgggtttgctgactttggtttttccccaggctaaagaagagcacaggtttctaacttgcactgaatcacggcagcaagaactctgcgtaggcactcactcaccaggcccagtctttgttctgctgattttcaggggcttgttgtgaaaggccattgcaggatcttgacttaaagcagatttttgactaatggggaataagttctcagccttctcctggcttgctctctttttcctaaattgtcctgcatgagaacctgagatcacccttttccaaagactgtttctcaggttagtcaacatttttcaatttccttctccattcagggatttgcccttagccatgcatagctgggctccttctgaaccagcacactaccacattgtctaaatgtgaggtctttttattatttttttagagataaggtcttgctctattgcccgggctgaagtactggcatgatcatggctcactgcagcctcaacctcctgggctcaagggatcttcctgcctcagccacctgagtagctaggactacaggtgcacaccaccatgcctggctaaatgccagatgatttctaaagaatcatatctcacttttacttaaaaactgtatatttattttaaattttaagctggaaaagcgttcaaacctctttctcatacttaatttaacaaaataattcaaatagtacttagggaaataactataacctttcgtttttcttgcttgctttcttttttaaagataggatggccattctggcctgggactagcagaaggcacaagttgtcctacactctcaggatctgagagtttgtggcctcttcagtcatcctcacaagtggctcttactcttccatagaccctgggtcactggcatccagcttcaaagaaatctaaatagaagctaagtcccccaaatcaagaacacaagacagactagctgctcaaaccaatgctagtattttgaacatcttgcagaaagcttctgaacagtgaaaaagaaatcgccctatggacacttaagcagtaggaattgaggaagggggagttgggaagggaagatgggatctaaaagaagaatccatgatgctgaaagctcaagaccatctgagctacttcacaggcctccctcataacattgatcaaaaccttgactttgagagagcctggaaaggtcgaactctgcacatcttgctttgtcctctccttttcgtttctcacccctttgatgcagccacaacataagttgttatttacctgtttcatattataaaaggactgcagccacaatacaagcaatttggaaaacagagaaggggcatgggaaaaccactaatactcctagcaatcttccagtctttttaaaaaatgcaattggccgggcacggtggttcatgcctgtaatcccagcactttgggaggctgaggcgggtggatcacaaggtcaggagatcgagaccagcctggccaacatagcaaaaccccgtctctactaaaaatataaaaattagctgggtgtggtggcacgcgcctgtagtcccagctacttgggaggctgaggttggagaattgtttgaacccgggaggcggaggttgcagtgagccaagaccatgccattgcactccagcctgggtgagagtgagactccgtctaaaaaaaaaaaaaaaaaaaaaaaaagaaagcaatcttttaagatatcattataggccaggcgtggtggctcatgcctgtaacccccgcacttcaggaggttgaggcgggcagatcacctgagctcaggagttcaagactagcctgggcaaccccgtctctactaaaaatacaaaaatcagccgggcgtggtggcacatgcccgtattcccagctactcaggaggctgaggtggaagaatcacttgagcccgggaggcggaggttgcagtgagccaagatcacaccactacactccagccagggggacagagtgagaccctgtctcaaaaaacaaaaaaaaagatatcattataagatataataatacaagcacatgtcttacctcttttcttttttttttaattgagatggagtcttgcttatgttgcccaggctgaacctcctgggctcaagcaatcctcccacctcagcctcccaagtagctgggattaccaggcatgagttgccacacctggtattatgctttactttaaaaaaaaaatagtatttaaaaaaaattctgataacagtagtgcacaatctagatgaaaaatatagaatacagaaaaatgtgtaagaaaaaaagtttctcaaattcccatcacctggtgaagttactgttgacacttcagtgggctttcttccagtcccttttttatccacatattatatactgaataaatatctacaaacacgtttcttcaaaccaaatttagaatgatagtgtatgtactcctttttttttttattttttgagacagaatcttgctctgtcaccaggctggagtgcagtggcgcacttggctcaccgcaacctccgactccctagttcaaacgattctcctgcctcagccttccaagtggctgggattacaggcacgcaccaccacgcccagctaatttttgtatttttagtaaagacggggtttcaccatgttggccaggctggtctcgatctcctgacctcgtgatctgtctgcctcgggctcccaaagtgctgggattacaggcgtgagccaccgtgcctggcttgtctgtactcctttatataccacttccttcacttaatataaaacatttctgcactttatttttcacttaaaatatccctacggtcatgaaaattaataacttttgaatagtttattaagtagatttcccataattatttagtcatttactggcttttaaaaaatctttttatttttaaatttaaaaacatttttaagagttgggggtctcactatgttgcccagctggcctcgaattcctgggctcaagcaattctgtcctgcgacagcctcctgagtagctgggactataggtacgcaccactgtgtctggctccttactggcttttcaaattgtctccaatcttttttttcttctctctcttttttttttttttttaaacagagcctcactctgtcacccaggctggagcgcagtggtgtgatcctggctgtaacctcagcctcctgggctcaagcaatcctcccacctcagcctcccaagtagctgggactacaggcacgttccaccacactcagctaatttttttttttttttttaagagatggggtctcactacgtttcccaggctggtctcaagctcttgggttcaagcaatcctcccaacttggcctcacaaagtgctgagattacaagcataagccactgtgcccagcctccaatctttccacagctataaataatgtcatgttcaacatttttctgcttttagctttttcctattttgaattatttctttaggaaaaactctcagaagtagaattaacagggtaaaaagaggtagaagcatttttatggttttgacacacaggctgttttagaaaggaccattctggttttcactaccatcactaactagagtccaaaaatggcaccttgtttcaatttgcatttctctgatactagtgaggctagaaatttttccacatttgttatccagttctacttccttgttttcaggttgtcagtttattttctttgatcatctatcttcctttttttttttttgagacagagtcttgctctgtcccccaggctggagtgcagtggtgtaatcccagctcacggcaacctctgccccccgcaaggttcaagtgattctcctatctcagcctcccgagtagctgggactacaggcgtgcaccaccactactggctactttttgtatttttagtagagagggggtttcaccatgttggccaggctggtctcgaactcctggcctcaagtgatcagcccacctcagcatcccaaagtgctgggattacagatgtgagccaccacacctagcctatctactgggtttttttttttttttttttttttttttgagacggagtcttgctctgtcacccaggatggagtgcagtggcacaatctcagctcactgcaagctccgcctcccgggttcacgccattctcctgcctcaacctcccaagtagctgggactacaggcgcctgccaccacgcccggctaattttttgtattttcagtagagatggggtttcaccgtgttagccaggatggtctcgatctcctgacctcgtgatccacccgcctcggcctcccaaagtgctgggattacaggcgtgagccaccacgcccagcttctactgggttttaagagggattatttgtcacagaaactctttcaataaaaatattaacccctcccatcacaacggctgcgaatacgcggttggccttttaattttgggtgatcattggcctctggttcccaccatgatattgaagctcttttctcaaaagaatgtggcataaaactcatttactgagcacatatcagggtcagacacacaacacattgcagggctaggttccccacgcacgtcctcatttaaagcctttacctaatgatgtgtctgcccagccctcatcctcagggttcctggaagagctgcagctgctgcacatttctcttttccccctacctctctgtccttcctctgtttcctttgccgactcttgttccagccctttcttaacacataaccccaaaattttgcctttaccagactcttaaaccttcatgtgctttggattcatgaaagtgtttttaaaattcacagattctgcctcccagccaaggcctccagaacatgaattccaagctgggccctggatgtgcatggtttgagctggctccttgggctaatcttacatggctgcacatgaccttcatctttgacaccagtagtatctagaaagtttggctagaaacctgttctgtaatggtgccttttccatcctctcccctccacctcaacagtcactgctttatttcaggtctcattttatgcaattgctcttcccttcagccataaagaagatactgaagttcccagaatcatcatgctgtttcaacctcgtgtatcttcacatgcgctcttccctctgcctggaatatccctcccctcctgtctcctccttaacccagcaaaatccagctactccctcaagctcaattcctggccatctccttccagaagattcctgtcctggtttggatgtttatctgtctgctcccccagcacctgccaggtgcacacctccctgagaccttagcagactccatagaaacagtagctgccttgtgtctctcccactgtaaacaccttaaaaggtagattaagttttgccttcccaacttctaggggcacagcaggtatcttttttttttttttgaggcagggtttcactgtcacccaggctggagagtgcagtggcttgatcttggctcacctcaggctcaaactccctgggcttaggcaattctcttacctcagcctcccaagtagctgtgactacagatgcacaccactatgcccagttaatttttttttttttttttcacagacaaggttttgcccaggctggtctcaaactcctggactcaagcaatcttcttgcctcagcatcccaaaatgctgggattacaggagtgaagccaccgcacccggcttgccaaatcatttctatcagcactctcaccatagcttccctgctcaatggcctatggtatttcccatggtctgacacagaaacttccaattctgcctgataagactgatccaaccatatttttgacatcaatctaccacacaccctgtgttctcactgggcagagaacatcaatatgtataagagaacccatacaaatataatttgttgtttttaagttatagaaatgtcatgttgttttcttttctcttttctttattttcagacggagtcttgctctgtcgcccaggctggagtgcaatggcgcaatcttggctcactgcaacctccgcctcccaggttcaagccattctcctgcctcagactcccgagtggctgggattacaggcaccggtcattatgactggctaatttttgtatttttgtagagacggagtttcaccaggttggccaggctggtcttgaattcctgaccccaggtgatccacccgccttagcctcccaaagtgctgggattacaggagtgagccaccaagcctgacccatattttcaatttaaagaaaacatatagcagaaagtaaaactgcaaagtgagtctcacctatgtccctgcagctttctccagtacgctctctcctatgagcttcctggactaaaccatctcgcgtgggtccactagcagcgctcagctgactccaggtgcggcccccttcctatggcgactgaaagccacaccccctcttacacctctgttgtgtacccctcagaacagaatgctgcgtggacatctgactgacaggtacttattaaacactctctccaactaaacctgccccttttcctcacctggctccatccatgtagctcaggggcagagcttggggaccgcacgatgcccccagctccatgtcagagggtgtgcgcggagcccaggctcccctgcgaggggcggaagaacacagaagcaggcatgcagagaatgagggaaagaggagggagtggggagggaacggggagggaacggggcttgtgtgtgtatctcagctgttgacacaagatcttgggaaaaggcccagtgaaaatctagtctagagtgtaagctgggaggcttcaagatagcatgagctcctacccaatgccctagccccaggatcctttctgcccccaaagcatctacagaatgtcttgggccctgtgggtagccccagtcacctctcctctaccttggccaagcagccattcccagcagggctcctggtgggtcccaggtccctcctcttgccccagtcccatgggaaaagctccctcacccagtgggaacaagccgtgatccaccatggcctttgcctttttctgaggagcctatgcgtcaagaaagctcgaggctgttgcactcagtgggatctgaaagtgttgtagagagaaggaaaaagaccaaaaggagagtggtttcaggttccaagccctataccctgcctgaatcactcaggcaaatttggctttcatttgattaaaaggatttgtgctctaaaaaggaaaaaaagaaagataaccaaatgacctaaaaaacccagagtcaagccctggagatgaagcatccgtgtagaagtcaggttccggattcagctctggtataaactatgatttggatcacttcccctgagtcattcccatccagctagggccaggaaaaatacctccctacttccctctcaggccagcagaaccttctgttctgagcacaaaggcatctggtttaaagcagactagcaaggataggaagattccctgggaaagggggaaccaggtgccaagaattcccatagtgactgcggggagaaagaggccagtctgttcagaggctggagacacttaccttgacaccgccatccgacttcttgttcaataggcttttggcagctgtgaaaacaaagaggaatatcaagtctcctgcattgtaccctctccccaacctgaagtccggcagccagatccacaagagagtgctgtgtctgacaagggggccaagggtctcccgaaacccccaaaagaggcacttcctatagcctctcagcaagaaggggatcttgagtggcgtcagagccctcagggtggcacctcaggatctcctctgcgtggaggagggcatggatgcacgacacttagaggagaagccatgctcagtactggagccgcctggggcactggggactctgcctttgacagcttccacccaggcctggaagcagagtgccagggtgaaagagtgagggctccatccctaggtgccatggaagttctctggatggccaaactgcaaggatgcaagacatctcctgagtgttctcaagaagcagagtgtcacagttcacacaggagaccagaggacagacagacacagacacagaaaccaggaccacctacaggagggttttgccagggggttgaagccttcactgagcaggtcctcaccaggttcactgggtcctagctgccaccctttccccagtgtccactctctggacctgtgagcaggaaggactcggcagaataatgagctgtcaaacagattctagccaggcatagggtgacgctccaggctgatgagctctgtgccagaaggctggtgacaccagctggccacaaaaggccacaggaaggtagcagacagtggggaggagagtctgggaggcacagggagatggaatcagcccaactgtctgatacacctggactgcctgccctgggtctgtatcttggttccaccacttgccagctgtgtgacctttggtgagttacttaacctctctgagcctcaatttctttatctataaaatgggataaagtagggctgacatcacaaaacagtggtgggaatccagtgggattatgcatgaaaagcacttagagtgcctggcatatagcaagtactgagtaagtgtccaccatcgttgtcactattgctgccaccctcctgccctttgggtagccattcctccccaagctgtgttccatctctctccagtgagaacaggggtccttccattacgagaattctgactccagaaaaagacctttgatcttatcttgtcgtgctgggtttgaatgttgttttttaaatgtgctgactcctgtgcctgaccgcctactgtctaagtgctttccattcaccagccagctctcaacgctggttgcccactaggatcacctgggagcttaaaaaaagcgtactacctatcttatccctaagggtctgattttattgtctggggtggggtcctggcattaggacttcttacgagctcccaggtaacagctgtactgcacaggcagggctgagagccttcgacagggtgatcttaagcaccaccatgttatttatcatccccattggagaggtgaggaattaaggctgggagagctggtgtgactcgctcagggtgtggcagggctaggatgtgaacccagaaacagctggctctgaggcttctgcactctggagcctttcagacctggaggccagcaagcgccagacttcacaattttgaggagcgcggctcctctgtggggtcttaaacagtgctgcggaaatctagtcctagcaccgggcagctcagggcaatgcccagcactgtctctgagggcccactgttggctgcagccctcccagggcatcgggctcttggcaaggctcccgctgcccagctccatgcccccaggctactgccccctgaaagttggcaagcgcccagcatgcatggctggttagggggctccataacaacgatgcgcttgcagatgccaagttaggtagtctgtctggcatgcccatctcagcccgcaagcatgggactcgcctccctggtgagtgggcccggcatgctggccctcctggtggggtggcagggggccgaggcaggcggtcggggaggactcatgccacgtaccttgcccggccaggccggcggcgctcgcggcaggcgaggcgggggcggagctctgcctgccaactgaggggatacagtctctcagtgcacagagccccgcaaagccacggggccgtcagcagcgagcatgccccagcgcgaggcgcagcccaggcggcgtggccaagccagccgagctgggggagcggagcgccaggggcaggctgaggaggtaggcgcagccagccctgcagcagtctgggggcctgggaagaccgggctgggccagggcatagggaacactgcgtccccaccagatggagagggctgcagtgcctgtctcatgaccccctccggaggagggtccacagcgaaatgcctgagccggtgagaggcaggtgccccttctgaggtagcccggccctagcttaaggctgtgatgaaacgccctcccttctagtccttccctccctagaagctaaatgagcccacgatgagagtgccgggggcgcagagcagccctctcccctctctacatcccacacactagagggactggcgtgggggtcccagggagggtctgtggcccttgtgcagctaagtttactggtgggccccagctccatgccccccaacccctcagagacacaggtccctgtcttaagggaggtagccgagagaggcagcattctcagtctgtgtgtcacagtgtgctgaggtgaaaggtgcccaagaaataaaccctgagaaagaaaacaaaggctgctgaagcaatacactctggaggccccgattcgctgttagccaaactgctagagtccaggataagccacatctcctattggaggtcaactcaaaaaacagccctagagaaacacacaggtgcccttccttcttgattgcatccatagacacctctttctgcagaagcttccggacagactctgtcctcacctgtcccagagtcagggcagaagaggccatcctggaatgcttgcaacattgtttgtctcctctgacccaaggcaaagtgagctcaaaggccagtctaggtctggccaataagaacaggaggctctacagggatgaataaaatgctttgtcctaacacccgatttcctgaaaccaggatgccagtttcctgaaatggagggggaggctgatgtggaggcccggggctgcaagacagggcccttgctattgactggctgggctaaaagagaagcagcagactgtcttcacatttcttcaactcagaggggagagaggacagagcttcgctctaggggcaacaccgaaacgcccttcaatgtcctctggaaaggctcgtagacccaaaaagtagaagctgcgtcattaaagcacaagaagcaagtgtgggactacagttgcaactccaccggaggcagccagccacgcttccctgttcccatctgcgagaggtggagccacaccacagtatgcccgtcgtgggtacccatgacacaagatcaagccccaaaccagggtcaaaggagaaggcctagggcagggcaccaccagccccgggctcactatccagccctggccttccggagctccatggctctcaggctacaccacgaagccctaggctccctgcctgcagcatcctcacagccaaggccctggcgttacctggagccagcgcaggcgagcccagcaggacgggtattcagaagtggctcccactgagtggtggcttaggctcccacacaaccccctttccatggtggtgcagaggggaagcaagggagggagtcttattatgggaaggagaagggggggtcttgaaccaaaacagtgaggcaaggggttagagggagggaggaccgggggagatggcaagctgggcagagccctctctgtcttcagtctcgacattaatcttttcctcacaaaaaagccactgtgcttcccaattgaaggcaaacaataataggggttggggtgagggtgggggcaagaggggagtggagtgtcttgcatcttaaaaataaatgtcaagtatgatttacaaattattggtcccacctctcccaattctttatgcaaatttaagcaagttcctttccctctctcctgctggtctttatttcttcactgttatagctagtatctcagggactattttaagcacaagtcgccacaaaaggtttaaacatctggaataatttctattagtcatctccacttggacaaaatgaagtaagagatcgtcccagcaggcaaatgaatggtggcaatttggcaattgagaagactcactgtacctcatctctcttttcttcccccagcacatcctccaagatcctagaatggctaaaatctgtaaagtgctgagagtcttcagagagttaaataagaatccagagaaacaaggtacatagcaagttgggcaggctactccttgggaagttctaggaaacaattcacaaatgtgagtccagccccctgaatctcaggagcaggactcagcagcagcagcagcccctcaaaacaggatcctcactcgccctggtcaaggtgtggcccaggacgccgaggaaacccagcggtgcccgggatggcaacagcccattcctgatccactcacctcggcataatcaaagtacacagctgggaaaacatacctgagaagttcctggagacaagcatggtcgtgaggatggcaccctggggaaagaggaaggtcctgtgaattcactgagaccctagaaaagggcaggctggtctcaggcaaaggcaggtcctggctagagcctgaagacatcaggcctctgggccccctcccctgtgacatgtacaaccttcagagcccagctccagccaggaggggagcttccttctgaaatggggcaggagccacactggtgcaaggcatgatgtcaaggaggctggcagcctagaaacgacactcaccttcagttttctccgggcattgaacttgcgcaaacactccacagtctcctgacgatgcatcatggatgccaccgtggatcgttgctagaaaccaaacagacaggctatgagccccagcccagatcctctgcgcctcccacagtcctggcaccgataccatgcccaggacagggtcatgcactcagccaccccagagttgctctgaagatgaaatgaggtcacagatgtgaaaacgcttttagaataaaagcactacccgaaactcaaggttacataaggacaacatgaacgtgagaacaccataacggatgctagacgggctgctgagagaccgtcctattcttccttgggaaacagaggctaccgaacaggagagtaccctgggggctgtgatcctcattcagtcactccttaggcagctgtttactgagcacctactgcgttccagatgctcagcagcgagagaacggcagggttcctgctctctacagaggacattccttccttccaagagcccctctccacacacccccagcaaggtcctgaatgaagccatgatcccagaagctaaggatcgtcaccttgaagcatcaattcttttcatcattctggatgtaatttttttttttttttgcaatggagtctcgctttgtcagtcaggctggagtgcagtggtgcaatctcggctcaccgtagcctccgcctctcaggttctcctgtcttggcctcccgagtagctgggactacaggcacatcccaccacacccagctaatttttgtatttttagtagagacagggttggccatgttggccaggctggtggtctcgaactcctgacctcaagtgatctgctcacttcggcctcccagagtcctgggataacaggtgtgagccactgtgccccgccttttttggatggaaatttgtcttcaatgtatttactgctaacttcctggcctccttaaacagagtccatgggacacagtctacacttcctcaatgactcagctgtcaataccagcatcattatgtaatttcagaatatagtgatgtcctcaggggctcgagacacacgggactgcagagggtagggcctgcaaaaatgaccccagaacagaatatttcccccattcttgggtgcctgtttcaggttgcttgccctctccccttgctgttgctgtcttcaccagcctgtcagaaaaacaaatcctggcacctgcagccaggtgcccaccaacactacggggcctcctcgcatcctttccctcacccttggcccactctttccaggtccggaggcaactctccccaccttctctaccttccccaagtctctcattttacctcctcctcggtgtaaatttctccaaaagcaaaatgagaggtcatcagcaagaacccctttcagctcagacttccactcacaagccgatcttcacctgcctccacactaatagaagtctcagggggatcatggtcatccccgggatggaccccctgcccttggctcaggagccccctctctttttctgctgtccaaacctttgcttcctcaattagcaaggatcttcaactctttcctctggactagattcttctctatagattatagttaagcctctccttaaacaaaaaaatttttttttttttttgaaacagcatctcactctgttgcccaggctggagtgcagtagcacaataatggcttactgcaacctccacctctctaggctcaggtgatcctctcatctcagcctcccaagtagctaaggcacgttaccacaaccagctaatttttaaagtttttttttttgtagagatggggttttgccatgttgcccaggctggtctcaaacttccgggctcaagtgatctacctaccctggtctcccaaagtgctgggactacaggtgtgagccaccgctcctgaccaatataatctttaaaaagaaattttttcttctttagaggcagagtctccctctgtcacccaggctggaatgcagtgtcattatcttggctcactgcaacctccacctcctgggttctagtgattctcatgcctcagcctcccaagtagctgggattataggtgtgtaccaacatacccagctaattttttgtatttttagtagagatggagtttcactatgttggccaggctggtcttgaactcgtggcctcaagtgatcgcctgccttggtctcccaaagtgctgggattacaggtgtgagccttacattaaaagctcccctggcccatcttaatctaagtatcaccatttatttcccacctcaatgcctagctccccatgcccctcctcaccctcactccctcttcgtctcactgaaaacagggtttcatctttctctccactgtctcagtgaaatgatgaaacaatggcatctaatggtcagagccaggggattcttccccaacttaatcagggactcttctgcatctgattcctgacgctcccttactgagaccccctgtttcttagcttctgggtcttctggaaggtctcactctcagtgctctttgctgggccccctaactctccctatcattaaatgctggtgtgtagtggccgtctcttctctactacagccaatagaagctcaccgtaagaactcaaccagcataggaacaggcccatctacagcataggaagaggctatttctacagcctcactaccaactacacagaaatgactacaatgtggatttccaatttttagcttcttttctaatctctaggaccatatttctaaccacccactgaatgtgtctggctggaggttgccagactcagcaggcacaaaatgaaaaccatcatcttggccgggcgcagtggctcatgcctgtaatctcagcactttgggaagccgaggcgggtggatcatgagatcaggagatcgaaaccatcctgactaacacggtgaaaccccatctctactaaaaatacaaaaaattagccgggcgtggtggcgggcacctgtagtcccagctactcgggaggctgaggcaggagaatggcatgaacccgggaggcagagcttgcagtgagaccgcgccactgcactccagcctgggcgacagagcgagactccatctcaaaaaaaaaaaaaaaaagagaaaaccatcgtcttgtctcacaaacaagctcctcctctggttttcttctgggtcagtgagggtacaactctccgctcaacttgaaacctggcctctctcttctttgctccccccaaatccaactggagagaattaaatcctttaggttctctcaaatatctcttgaatttcaacacactgcacattcccccatccttaccctctgctgagacctcacctggtcttgcttagactattccaactattaaaaaagcttcctgagctctctgtctccagcccttttcttttaaaaattttcaattcccttctttttttttttttttttttaaagaggtggggtctgaccatctttcccaggctggagtacaatgactattcacaggtgcaatcatagctcgctgcagcctcaaactcctgggcttatgatcctcctgcctcagcatccccagcagctgagactacaggcacatgccaccatgcctggcaattcatttcctcacaacttccaaagtgttcttaaatgcaaatttcattcttctttaaaacccttaaatgattccctatgttttcagaataaaatccaaactcctgaggcagaaacttgtatgtcagggaatcttttgccccattctcttgcattctgatatttgcagcctcatcgacaaccaaacaactcaacattccttcaactcaccatagtttcccataacctctcactgtgctaaactctgtctgcaggttaacgttctgaggacctcgttatttgccaagaacaagcacaggggtgtcacctcctccgtgcagccttcagtaaccccaccacccaccaggaacagtaggagctcctgtactctcattagattcttgtacctacttgtcacattgtaacatgactgcctgtttgagtgcctgtctccctagatgatcttttggggcagggaccatgcctcattcatctttgtatctccagcacccagacggtaaccagcaccaaagaggtatttaataaacacagaatggacagataaataatgcctcgtggttgtcaagatgcctaactctaccaaatcctcttctttgtctgaaagttgatatttcagcttgaaagaattgtgtataaaaacagagtacgtcaacccacactgatagcctagaggactctcctaggactttagcgcagaagctttatgcctcagcttttatgcttttaatgactcagaaaccccttctgttgatttgttggatcttggtcaccactccagtggagttgagatctgagtatgaaccccagcttgggaattcactttgggttttgccagctgctttctatcaccggctacctggagtccacaagggtcaacctgagccctcatccaagaacagaaccaatcccagcctgacagccatgagtgggggagagaggagcagtggcccaccagccccatcagcctcccgagtctccctggtgacatttattgaccctggccctcaacagtcctctgcccgcctgctcagttattgcttggggcccagaatgaatctctgctggtaagaaggagggggtggtgccgagggcacacagaaggctgacacccctgagctccttggccactagcaaagacacttacacagacccacgggtgcttgagagcctggtcagccgtgatgcgctttgctgggtttatggtcagcatctggttgatcaagttcttggcttcaggagttaccgtgtcccattctggtgatgggaactaaggagcaggaatagggagaagaatgtggtattggtgagcttcataccctgcaacactggttctgtcttcaactcaactcctgtaattgggatactctgtggtacctaaagctgtgactggcagagttggagaagccctgcggctattccagaacctgtgtcaacttaaagacttggaaagacagacagaacagtcatgtttagaatgccagaacatcagattagagcgggaaggggactccaacattctctggtttaagcccagctctatacttaggagggaacagaggctcagcaatgtgtccaaggtgccactgcagtggagggagtctccaggccttttgtccctgtgttacacagcacaccaatgaggccgctccattctttgcaagtaaagatcaaaggacttcagtggactcctcaattttagttatgaagaaggctgtgcaaaagaaagttgctccctgggacatagagtggcaagaattgggccctggatgcccattcctgggtcctcaaagtcccctgacacccccgtatcacgtgacacactaaacaagcctgctcccttggacagagcccgaggagcaaggacatctgcccttcctggcctggctgcccggctctctggtccttacatcataggctccagccttgatctgctgatacagcttgtgctgatcctcatcccagaagggaggatagcccaccaggaggatatacaggatgacccctacgagacagaacacacaggtcatgggggtcagtcgcctacttccctgaggaaccaagaaaaaccatgcagggctcagagccacctagaaaggcaggggccataccagagtcagaagtggatgccagccgataatgctatgctaccagcccctcctgctatgcctcacacttcacgtcaccaagtcacaccagggatttctttaggcacaacccatcctctaaggcgtgggcaaatccctctccaagaaggatacaatgtcatcccagaagtacgcagggaggagggtgtgatgggaacagccatcccaggggcaaacaccataatttcacatacaccaggcacgtgtgtgacctgcaaggaatagcgatgcctctttcttgccatcatcggaagttgagggcccttaacagcgaaaagctgagagcgtggaatgggcttaccgcaggcccagatatccacaggttttccatagggatctttcctcaagacctcaggggacaagtaacctggggtgccagcaaaacctgtagcaaaagagagggcagaggcatactgaacccactttctctctcgttaaatccacaccagccatttcccccaagtcccatcttattcctgctgcttttgctacataaactctcagcacatgggcagcaagagctgacaggctgggcttcttgtagcgcctggaatctgaaccagacggcaaagccgtatgcctaccaggaactccagctccttcccacaggcagcaagaaagcagtgctgacaacagctagacttactgtactgagtcgcgtacggccaagagagatctcggaggccaggaccattaagggtctggcttctagttctaatagaggaaggcagatcaggaagaggaggaagggcgggggctgcattccgggaagacaggatcacccttaccaaaccaagcctgctgctctccctgtacttcgatggctaggccaaaatcagccagcttgacggcggcacccttgcatttactcgccagcagcaggttctcaggctgcagaagaaacacagagaaccttgtgagcacccaccctgcagcccagaggaagcctagtttgggcctacgcagtaccactatctggcaccaggtggcgccaacacttcatgagcagaggcacggaggggagcctgggtagtaccttcaggtccctgtggacgatgtcatgctggtggatgtggttaacactctccagaatctgatgtatacagtggctaaaaaagcagaaggaaaagaaatgttagcgcagggttaaaccacctcatccacatccacaaccacatgctgcagactaaggcatgtgacaaggggccacggattcacagagaatcacttaacggccactggaaccttagactctgcacatcatcttgttcaacctatttaaagaaagaggaaaccgaggcccaggcagatgcaatggtttttctaggatcaccgctagaacgggttcctctcacccccttttgactggaaaggtctaacacaaccaactcatttccaagagatcaggagacagcccagaatcctgaggaagaagagagcatccaatcccttccttctttctctttctccatacagtaactttgttcttggagaagaagcttgtgctggcaacttaggaaggagagtccaactaaacaacctaagctactttggcggtgggtgcactcattcatttccctaaatgtttattgagtgcctaggataatgaagatggacaagacccaatagctgccctgaggtctggcatccagtaaggcagctaaaacaagtacaaagatacctttaagaaacaatgtacttaagagcttccaaacagggcatttaaggagcacttctgatgattttgcgtagagaaaaaaacccaaagttattttattattttatttttgagacagggtctcactctgttgcctgggttagagtgcaatgtcgtgaacacagctcaccgcagccttgacctcctgggctcaagcaatcctcccacttcagcctccccagtagctgggaccacaagcatgagccaccgtgcccagctaatttttgtatttttttgtggagacaaggtctcaccatgttgcccaggctggtcttgaactcctgagctcaagtgatccacccaccttggcctctcagtgttgggattacaggcgtgagccactgcgcccagccacagtcacacacgtaaatcagactgtccacatagcaaaccatcctgccatccctgtcatcaaactcctgacagggagcgggggcagtctagagcagtggttttcaactgggaatgaatttgccgcccgcccccccccaccgcaggggacatttggcaatgcctagagaaatttctggttgtcacaactggaggaggggtgctcccagcatttggtgggcagaggccaaggatgcttctaaatgtctgccacaatgcacaggagaggcctcacaacaaggaagtacctggcctaaaacgttagtagcaccaaggctgaggaacttggcctagaatatagacccccgtcatcaggcactatctggtatattaagcacatctgcagagcatcccagtgtatggggctgggtggcctggacttactattcctaaaatctgatgctggggatgccacaagaaccaaggggtcgtactgggtccctgggggctgaaactcgggcctccccataggacacagcccaagagtgggccacagaaactttaagactgagctatagaggcgagtctccacagagatgtataattagaacagagccgggctagcagggagcgccttctggccaaaaatggcaaaagtgcgaagtgtcccagcagagccaggccaagcccactggtacagtcaccccccctcagggccccctccctatagctctccctcctccccgcaggctccctgagccatcactgcctcctccgtcccagagcctcgtcctcccctgctggcactggaattc

SEQ ID NO: 22660 - DNA, 171653 bp, Homo Sapiens
gaattccagtcctgcaaattcttcatcctcagtgagttttcaaaaggtgccttcctatgagtatctgtagtgaaaatggtttgtgcaggggtatgtgggtttgggttgaaaactggccagataccccagagagtcatcacaggaaacctggctgcagtataagccgtgatttgatgaacatcctgagaaggtgagggacatggggtcaagacctgattctggctgattgaggagcatctgtcttcacccctctcagattcctcctctacttcctcaccagcctcatgggatgagtatcaccaagatgcttttgaactctcaagatgcttttgaactgcctgggtgggccaggcagtggctcatgcctgtaatgcaagcactttgggaggccaaggtgggaggattgcttgaggtcaggagttcgagaccagactgggcaacatagcaagacctacaaaaaatttaaaaatagtgcagtatggtgacatgtgcctttggtcccagctactcagggagctgagatgggaggatcgcttgagttcaggaggttgaggttgcagtgagttgtgttcgtgccattgcactccagcttggacaacacagcaagactgtctaaaaaaaaaaaaagacatttgggcagttggggaagtcaagtggaggcacatgcattgaggcagtgagggtgatattttctgtgtgcatctgccaggcactccatggtcacccattcctcctcttcctcatctggtcagttcatcttggaatctgcccagagaactcagaagagcaatagactggctggctggttgcagttacttcctacaagatgttcctttaccatccttgctcctaaacaggggcttcccattctcatgaaggtggaattggggccaggggcagtggctcacacctatagtccaagctacttgggaggctgaggtggggggatcacttgagtccaggagtttgaggctgcagtgagctgtgattgtgccactgcactgtagcctgggtaatagagggagaccttgtctctttaaaaaaagaaaaagatgtaaatgagcatgggcttttctaggaggatggttctgtggcaaggccggcccttctgggagctcatctaatccattgcctgcagaccgaccccactcatagcaaattcaagtcctgagccattatccgcgaaccccataggcaccctgggagggatggaaggaacagtagaattgtgaggtgacccaagtgagtcccctgagtaggatggagccagagggagtcaatgaccttccaggtccacatggcaggttagcggccagtagagccagagccctggccacaagctgcccttcactggccaccagcacctgagtgctccgatcgccccctctgtctcctcctgctcttctccctcacggctgaagctctggaagccgtccgcttatttgtagcatctttaaagagagtgtagtggaggggattcttgcttgaagtttttcctcagaggtttgcctcctgcttgtgcagtttttacacgtcagaatgcagaaattggccaggtgcggtggcccacgcctgtcatctcagtactttgggaggctgaggtgggaagatcgcttgagcctgggagattgaggctgcagcgagctgtgcactgcacgtttgcaccactccactccaacctgggcagcagagtgagactccgtctcaaaaaaaaaaaaaaaagaaaaagaaaaagatgccatggtgttgtagaaagtggtcgggccagaagtccaggaaccaagttctgctgctggctatgcttgttttttgcagcttagcctctctaggcttcagccctcacccagtcacttaccaagagttgttctaagaaccaacgtgctttcaggagtaaacaccactacagagaggtggcgtgtccactcacttttaggagcacagatgttcgttgtgtttccctaagaagagaattggtacttgtcatcattctgccatctgcaaaagctggattcccctgcccctgcttttctttattaaatataattttattttttgctttggttttagactgcttttagacagagaatatccatatatccctcccctagctttcccttctgttaacatcttaatacagttatccagtagtccgtggtacatgttatccaatcatatttatgtagttatcaaaaccaggaaacattggtttgatgctattaactaaaaatcttactcagattttaccagttttcccccaaatgtccttttttctgttccagaattctatccagaaccccatgttacatttagttgtgattttatcctggtctcttgcagtctgtatcggttctgtagtctcacttgtttttcatgatgccttcttaaagagtattgacctgttttttggtcagactccccttaatttggatttctctagtgttttctcatgagtggattgaggttatatgtttttggcaagagcagcacagaatgatgctgccacatcccacacagccgcctccctgctgcacacacacacaggtccacagcctggcaaaacacttgtaaaactgtgctgacaccagcagtatgtaagtgtaggattttatattcgaccattatttaacacactcctcttgatttagctacatttctagtatttgattctcaaagcatattattcttagaatttctcatactaatctttttctgagaaagccagaaaacttctaagatattctttttaaaaaaggtttttattattcaaagggcttgaacaattactttttgggggccaactctgtagtgagttaaaatgaagctattgagaggatagtgatggttttcattgaatagcttcagtttttagaagcggcgtcttttaaaacttgaatgagggaaagggcaggtttattttgcattagaatgccaccgttggtgaaggcagacatttggaggatatgagggagtgcctgattttatacaaatcagtaatttcgtaacagagagctaagattattccagaggctaattagaaactattttcttttggaattgtgtatggattgctgtctgggctcacagttgaaattcctcttgctatgcagatgacagaacttaccactttcaagctgaagatgaacaggaatgtcaaatgtaagttacatggtggtgggactttgggctggactcagccgttgtttgtggaatttaacacagcgttgctcttgtttttctagatggatgtctgtgctgcaaaatagcaaagaagaagctttaaacaatgcatttaagggggatgacaatactggagaaaataacatcgtccaagaactgacaaaggagatcatctcagaagtgcagaggatgacgggcaatgacgtctgctgtgactgtggggcgccaggtgacccagggaccccacccgaccctgggctctaggacatttcaatcccattctgattcacagaatccgttcattgattttcactttcatttcaaacacgaaattaagtgcagctcagcctgagttcatcccattacacaaatgcttaatgaactgtgcagaccgcggcaggggagaggggcgggaagatgtttgcctgccgggccccagagcaggactgagtaaagagggtttgacagagctgcaaagtttgaaatgctttttgagaaatgaaaactgaagggtacagtgagagtgaactcaaggtcatgtgggctgagaggctgcatgtggatgggcttccttgcttggaatctgctctcttctccctttatcctactttgcagaacttctgaagtagctttaagccgctgtctggctctgtgaccctgggagagccacttgctttgttaaacatcgattttcctgtctgtaaagtgaagggacaggaccctttcagctgacacattctgtgaaataagattttatttttacattttgataaagcatattaggggctttatagtaggatgtgatttaaggaatttgcttattctaattgagacacaatggtggggagtgggggtcggggactacacaggtgcattttctgaacatttataaaatgaaaaagatggaggcttggctagaatggttaatccccttttcattcctctaattctatgacaatttttcttaaaaaaccaaacacaaccaaaataagagtggacagttgagaattacctttaggttcccatgaccctgaagactgtatttggccttggatccattaaaaaaaaaaaaagaataccgactgggtgcagtgactcatgcctgtaatcccggcactttggaagactgaggcgggcggatcacttgaggtcaggagttcaagaccagcctggccaacatggtgaaaactcgtctctattaaaaataccataattagcccggcgtggtagtgcgcacatgtagtcccagctacataggaggctgaggcaggagaatcactcgaatccaggtggcagaggttgcagtgagctgagatcacgccactgcactccagcctgggcaacagaacgagactgtatttaaaacaaacaaacaaaaaacccgaaaatacgtttttggcaggagatgaggtagggggtgataagtagtgaatcatggtctttcttgagaaagggtaaagacagtctatgatttgggtgtttcatacgctttgataaagaactcaaaggtatgtactcattattttaaaatgccaagacagtgtgggtaatataaaaatgatgtagagtcacctaaatggatgcttgtacctccgcaaagcacaaatacagtggagtcgtcctacacaagtgcagacacagacgccaagaaggttttccaacatggataacatttttaataacttgaacatttaaaaaataacttcatgatttcctactgactaaagttgcgatatttacctgccgtgagtttctcagggcaacaaacagttctgaagagaattgtatttatgggttgtgatgatgtactcaaggacatcttatttttaatttcccatttttagcaaattccacattcatctgtcaagcattttgtgggtccctatcatctgctaaatgtatggtaggtcatgttagtgagtagccgagctgtgaggggaaaacgtggctttgaactcaggtagaggcagggccacagtctgctctgcactccctggcgacctcgagcctgagcatcgcaaagctgtctctgccatatagtgagataaaaatccctgccctggtcatctcatggaactcttagatttgatacaaaagtgctctgtgattgctgaagctcttaacaacacaaactgttattgctactaccagcatgctgaacacagcatatcttatgtacatagtacgttctctgttattatcagcatctgtagatgcatatgttttaagcctattccccttttacaagtagactttggctggtctcattgttttcctcttgctccattctgctagtgtgaccaagttggtgatgggcatggtgtgttttcaccaccagccattgaggagcccttggtcactggagtgtgtcctgtttatttttgcacacacagcacctgtcacatgaatggaaggatggggagatggagagagagggaagaagagggagagtagatgtgtgcatatttgggtattgcatgtaaattggtggtaattatggacaaagtttccagctgtgttaaggatcagaaaatgctcatgctcagaactgcttgttcagtaactatgcaggaagaaagatgtgactcctgaccctcttttttactggaagctcaaatctgccctgttctctttggcagatcctacatggctttccaccaacctgggcatcctgacctgcatcgagtgttccggaatccaccgagagctgggggttcattattccaggatgcagtccctgaccttagatgtactgggaacatctgagctgctggtaatttttaaatccttgatttcagattggaaacaaatgagctgtaagctaaattttacttttggcattctaatccattttggtaagctagtggttgttgatatgttgccagattggtttggataattagaaactcattgataattcttcatttttagctacttgtggttgagggcacttcttgttgcaaaactttattcttaaatgaataaaggggagtgaaaccaaaacaggagcattgagagtggtgtgagattctacagaaatggagtaagatggtgacatagaccagctcaccccatccattagacagatgtggaatgcaacgtctaaagacaggaaagtacttgttttcccttatcaccagcgatttctgacaaggctgtggtgacaacttgcctcaagcctccgacttctccctaccccagattgtcccccatggggggagatattggtcttcatttttactgcctttgtttcttaagtctttcattcttggttcagtggtaacacttaagccatgtgatagagataggaggagacagaagcattttctgtgaagtggctttcaagagtatcgagactgtagtcccacaaggtccatcagacagggtgcttctggccacctaatacatgagctttcatgactgtcttccctagaaagcagttcttgaattctctcctgggatagctggatgttgacagtaaacagtaagtagatagtgattggcattgattttaatgttgaatttaaaagtttacatgtagggaatttaacgtcaagagcaatagtcttgacagaaaatcaatagttgtggaccatgttcctctcaaggggccatcagtcttattgatgacttcgaatccagtgtgtctgaacttcgaatgcattttgaactctcttgtcaaacctttccagtctttctaggaattcctttatggtcttgaaagacagagttgggagaaactacagtggatcctggcagcctagttagtaacatccttagttacttacagtttaaaactaagctagactcacttaaaatgtaaaactaaggaactccaaacagtgccttcctggttacatacagcaattattgttcatgtaataatgcacgtaacctacagcttagagaggtgcacaggtgtacatgtggtatctcttggataactgatgatggcatagattggaggttgtcatggtacattttcaaagaagcacaaagtacttttcagtaaacactggtgaactatggcagttgtttcttttactgattttcttaaaacaatggaaagtgttaagtgattcaagatgatgtaataattgtttattttgtactatgtattttgcaggccactttatatatactaggctcatttgatctccagtaacaacctgatgaccttggtatattatccccattttacagaggaggaaactgaggcttagaatgtttcagtatgcctagggttatgaagcttttaaggtgacagatctggggtgtgggcctctttaatctgataccagacctcacacttaaacctttgacgagcctgggacacaaattggcattttagtgggttgtcttgctagatgataaacatttaaacatctctactgtccttccctatcaccgtccccaacaaatgtttaacagtcaactctggagaaaaaagaaccctggtttgcaacctgcctgttctcatggtgtaaatactcccacaatggccaatttcaagctacctaagtgaattactcaatgtgaagttggaaaaagatgttcattatatagtacattcactatgcaaacacagtggatgtaaataacttcatgaacatggacaatagtaaaatgcagtataattaggaagtgatgagttttgagtatatacttgttattaatgtaacataattatgagtttatatagcataatttttaatagtagcagtgcttaacagttggcttgcaaaattcctgaaattttaacagttgactcatatgagctggtaggagcccgaccccaccatctgttataattttttaaatgtgtctcagaaatttcatgttcttcatgagactgagttgcctactaaagaagaaaatgccaaagaaaggtgaaaggaatatgttgttctgtcttgatgaaacgatgaggtgacttctaatgcctggttaaattctccatttctgtctcccagagcctccatctgcattcttgtaggagtttaaagtttggttggctgtcacccacaatgagaaatcagccagtgcctgcttaatcaatgtctgcagatattttcaaaatctaattgcttccagagttttaaactctcccttacccaagtcttttttcctcagtggttatcaggaaaagtagagacagcagtgaattgtgtaggatttactcccttcaaccctgctttccctgagctctggctggtcctctgtggttcacaggaggtggacatctccccacggctcccccaatccattttttgtatgctaggagtgtggtcatggtgtcgtggctctaaaccttattccttagcccttcagttaagcagtacgtagggtgtcaggtgttagtattcattggcaaagcttggaaatttcaaggcttctttctttcttttcttttcttttttctttctttctttccttcctttcttttcttttccttttccttttctttttttgacagggtctcactccatgacccaggctggagtccagtagcacaatcttagctcactgcaacctctgcctcctgggttcaagcaatcctcccacctcagcctcctcagtagctgagactacaggcaagtgctaccacgcctggctaagttttgcatttttggtagagatggtctttcgccatgtccaggctggtctcgaactcctggacccaagtgatcctcctgctttggcctcccaaaatgctgggattacaggtgtgagccactgcgcttggcctcaagccttttaaaagtatccagattgttttattttgcttagacaatcaggtactgggatgaaggatttcctgaagtctttttacctctttatcttatctctttctctgcgtgtgtgtgtgtgtgtgtgtgtgtgtgtgtgtgtgtgtatttagaattatgtctgacacaccgttaagaaccataaagtattagttatcattgttatctcctttaacaaaatcctttcagaaaaatggtccccatgtgctagcatgtgaacccccagggaggccatgcatggtctgtctggttgtctgttcttacgaacctttccaattcagagttgcatgccatgcagggcctcggctgacttgcttattgaagtatgttttattgtatagtgagtgttcattaggccccttggtgccttgtgaaaggagagtggtgggtgcagcctggacaggttctctcacaggagtagcatctctcctcttttgggtaaatagaacagcctctgtttcagggtgacatgctgtgacagcaaaggattttatttttttaattaattttttattgcatgtatttatagtgtacaacatgatgttttagtatgttgtatacattgggtgtgactaaatcaagctagttaacatatctgtcacctcacatgcttatgttttgtggtgagaacacttaaaatctactctcttgagcctggtgtggtggccggcgcctgtaatcccagtactttgggaggctgaggtgagaagattgtttgagtctgggagttcaagaccagcctgaccaacatagggagacctccatctctacaaataattttttaaaactagctgggagtggtggcaagtacctgtggtcccagctacttgggaggctgaggcaggaggatcacctgagcacccaggaagttgaggctacagtgaactgtgatcttgccactgcactccagcctgggcaacagagtgagactgtctcaaaacaaaatttttaagtatacagtacgttattattaagtagagtcactgtgttgtacactagatccctagactttattcatcctaactgaaattttgcatgctttgaccaacatgcccacccccaacccctggtaaccatagttctgctctctacttctatgagttcagcttttttagattttgcatataaatgagatcttgcaggatttgtctttctttgcctggcttatttcacttagtataatgtccttcaggttcatccatgttgtcacaaatgacagaatgtcctttttttcaggtcgaatagtattccattatgtatatataccacatttttaaaatccattcgtccattggtggcatttaggttgattccctatctcgactattgtgaatagtgctgcagtaaacaagatggtgaagacgtgtcttcaacaaactgatttcagatcttttgggtaaatacccagaagtgggttatatggtggttctagtttttcgaggaacctccataaccattttctataatggttgtattataataatttacattcccacccagtgtgcaagccttcccttttctccacatccctgccaacacttgctatcttttgtctttttgataaaagccattctaacaggtgtgagatgatcgtggttttaatttgcatttccctgatgatttgtatgattaatgctgtgtactttttcatacatatacctgttggtcatttgtaggtcttctctttctcttttttttgacaggttcttgctctgtcgcccaggctggagtgcagtggtgccatctcggttcagtgcagcctctacctcccaggctcatgcaatccttctgggtagctgggactataggcatgtgccaccatgcccagctaattttttaaaatttttccatagagacagggtctcactatattggccaggctaatctggaattcctgggcttaagtggtcttccagcctcggcttcccaaagtgctgggattataggcatgaaccgcctgcagcctagcattacttcttttccaatggaatggaagttgcataattgaattattaattagttctggggaatcatgtcatcttaactactttagcacacaccagcttaatatctttagattctaaagcaaacctactttgggaaaaactttctggtaaacacagattttaaaaagataaatttccttcttaatgtagaagatcatgatttcagctttgatttttcaggtcatatgaaaaacagtatcactggtactagggtactactatcatgatcaatttcactatcatacatgaagttaataaaggaattcttgatattctgaaattgaatttgagtcagtcatttaaaaatcttatgagaccaggcgcagtggttcacacctatagctccagcactttgggaggctgaggcaggcagatcacttgagcccatgagttcaagaccaacctgggccacatggcaaaaccccatctctacaaaaaaaaaaaagttagctgagtatggtagtacatgcctgtggtcctagctatcagggaggctgaggtgggagaatcacctgagcccaggaggttggctatagtgaactgagattgtgccactgctctccagcctgggtgacagagtaagaccctgtctcaaaacaaaaaaacatcaaattaaaaaacaggcatcaagagcattaccaaatatttactgactcagctttctgtttcttgactttcttctatttctgttctcatacggttgttaataagctgtcaaatgttaaagcgggtcaacacacagtctgatctgaaagagagcatgtggagaggaaagctcctcaaagacgaagaacttaacgacttacaactgtcttctaagttcacctaggactgaaatgtgccacccagatactaaaagcaattgcttagggcaacaggaaattgactatcagtggtcatttacggaggaactgttatgctccaggcattgttgtaggtgttctacgtacactgtattatctaacctaaatggagagctccatttttaaaaaaagaccagagaggttaagaaacttacccagtgcaggatttacattccaactatcagactccagagcctgtgttttagcctttttttttaaagccaagattctgaacattttttaaaccacaaagtctatcagaaaaaattgagcaccaaagcatgtacttacttacatatgatgtacctacacttactaagaaatacatactttgtaaactacatcaaaaatagagcttttaaagggtcaggtaaagacatcatatgtaaactttttccctgcacaccagagtgtccttttgtgctctttgctttggaggcagcagtttggtcaagccccttcccttgtctgggcctttaccctctgtactttagagctggactgcactcttcaggccctccacccttcggggatccaaggggcccagttaacatcagggaggagctgaccttggggtctcctgagctcagcggtcagggaagtctggtttctctcacttgcctgttctctcctggggtgagtcagagaagaatgtcacagcaattgttgtccttcctcatggagacatgaaaacaggacaggaggtttccctgccccaccccaaactctcaaaacaatgtccagataaaacctaaagcttcattttggctcagtgggccctgctcaggtaggtgctaaggacgtacaggtgtgtgattctgtgtctctgtcctgggtgtggccatcagggagggagatgcccacacacagacgactcccccgtatggtgagtgccaagaaaaggggcctcctggccaagggactgctctgctcatctgggcctggtgccgctgtcctcatagtgttcaggatgaacttcttttccagggcttcttattgactcatcgctaccttgttgaagtgagctgccatagagcaggagggtgcctcatgcctcatgcccagcacagacgaggggctcagagtgtgctcctgaggccacaggaagggcgacggactgggctgagctaccctgggtgatacagaacttaaacactccctcctctcctccatccagtctggctcaatttctgcctcagtgcagcccacaaattccttctgggtgccagtgagaagcaggagatgccagggctcaggtcgacagccaccttcctgcccccttggtttctgcctgcctgtcctgctggcacctgcagcctccatttgcaaatgctttgcttttgtcgatgggtctggaggggttctctatgggctgaaacgtaaactggaacttggcagaactgcaaggtagcacgtttctctagcattggatgagtgtgacacatggatgcggtggctccctggaccagctgtctctcagttaaccagccaagtccaagcagaagggaagcagctcttcgattcctggggaattctcctcctcccatctccccacccccatctgcttaacacaaactaggaggcatcagggtggttggcccctggctcatagagggggccacagtgatttttgtcactcaacttgggaaaaccattgtgctcacctggggacagtgtcctgcttggattgtatgctgcctggctataaaccaggcgctctgacattggggttcagtcctggatctgacaccagctgcctgagaaacccttcacagggcattagcttcctggtgcataggtacctgtcaccttaagtggtgtgccacctgaccattctgttgtccctgggaaaattgcaacgcagcctctaggcttttgcctcctgactgatggcttgaggtcccagagccaggactgagcaaggaggtggagttggttaatgttttatgctttgggccgcctagaaaaagctttttccacgtgtcaagggccgggttgaattaggaaagctcatcatccagctattaggctaccccacataattcttctgtttttaaaaaattgcgtctgcatcctccactagcccactagcccatttcaccgtttgatgttatttgccgccaggaagttccagtgtatctaacccagacctcttgggctctccttcagtcagttccctacaagagatagacccgatttcaggctgcagcagcctctcccaaagcatgtttgttaactcctttgcctgcataattttttttttttttttttgtagagatggagtctcactctgtcgcccaggctggagtccagtggtgtgatctcggctcactgcaatcttcacctcctggattcaagcaattctcctgtctcagcctcctgagtagctgggactacaggtgcacgccgccatgcctggctaatttcttttgtattttagtagagatggggtttcaccttgttgcccaggctagtctcgaactcctgagctcagccgatccacccgcctcggcctcccaaagtggtaggaatacaggtgtgagccaccatgcctggcctgcctgcataatcaatagagagcagaaatatcacaagcgtcactgactccccagcagaacatggaaatgaaaatatgttttctcaaagcactgagcttggtgctcccttttggtattatttcattaaacgtttaagaatctgacctggccaggcgcagcggctcacgcctgtaatcccagcactttgggaggctgaggtggccggattgcatgagcccaggagttcgagaccagcctgggcaacatggtgaaaccccatctctacaaacaatacaaaaatcagctgggcgtggtggcgtgtgcctatagtccccgctgcttgggaacctgaggtaggagggtcacctgagcctggggagggcaaggttgcattaagccatgatcatgccactgcacttcggcctgggcaacagagcaagacactgtctcaaaaaaaagaatgtgttaatttaatgtttaacatgtcagaagattgattggcaagtaaagaccttacatctggagctaatatattacatttttagtgtttcagtttactgttttcacctaaattttatcaacccagaagtataggtatcatcccattttactgatgaaaactctgccgctcagggaaactgacttgcctgtggtcacacagccggtaatggagctgtgatttgaacctgagtcttagctttcctggctcagtgccgcttcactctaccagaactacctcatagctggcataagtaaaggttgtttgaggatgtgaaatagattcactttggttgaggcacaggtcattgggaggagtgggtaaggatggaaattcacattggaccaagttactggttctccctgtctctgtctgtactctatccagagcgcgttttatgacaatgcgtctctgtaataggcatgccgcttcttatctttaattttatgggtacctttgggctttgggttttgtccatcttcattaaaggcaaaccactttattgctctatttcttagtggccattaaataaatcatcagatggggatgggtaatgtgtagcagtagaatgtattaataattgagtatcctgaaatagactttcatttttgcagctcgccaagaatattgggaatgcaggctttaatgagatcatggaatgttgcctaccagctgaggactcagtcaaacccaacccaggcagcgacatgtaagtatgggactggctattctcatttgctgagtaaaggtttgcctttgcccgagccccgggaggcaggggaataagaagttttgggtgcatccatcgttgcttctttagggaataaatcagcctatgttgggttttcttagtcactttaaccttttgggtgaccaaatagaaatttttttaggaagaagccaaaagcaggcaggtttcgcagatgctgtgcgtgtgtgcagcgggtatgtagagagcctcactcgccactggtgggtggaagaccctggacttttcacctgtgctgtctgttctgttgagtcacttccccgtcttggtctctctgcataatcctgagccaccgagatggctggttgtggtagatatgtgattatgtagcgtccttcttgccaacgtccttgcctccttgcaaatgtggaatgtgttacttccttcaaaaaatgtttgtgtttgtgttattgttgatacacaacttgacggagaagcttttttttttttttctgggagacggagtttcactcttgttacccaggctggagtgcagtggcacgatctcggctcactgcaacctctgcctcccaggttcaagcgattcttctgcctcagcctcccaagtagctgggattataggcacatgccaccacgcctggctaatttttatatttttagtagagacagagtttcaccatgttggccaggctggactcgaactcctgacctcaggtgatccactcgctgcagcctcccaaagtgctgggattacaggcgtgaggcaccgtgcctggccagcggagaagcttttgtgtctactggtgcagagctgacaacagggaatgttcttgcccatcttatcagagtgtcagtggccatgtcacactagtcttcgagaagaggtggacagggagacccatgggttcgggcagtgggtgtccggctcgccttagacttcagctctgtttagtattatggctcttatgtctatagggggacatgggtggtttacctgttttgttgtgatgcaaagtgaaacagacggaaggaaggagagaggctactgggccagttaacagagcacctgcatttgagtggtgaggctgggtcagcgtgtcctggcaggacagagaaaaatgaaaaatatgtgataagaaaaagtatttaaaaattcatttacagaaacagcattttctgtggaataagcctgaagtagaattaatgacacgagtcttcccaaaggacagtgagcaacagtgaacaatgtctttaagggtggtttcacaaataggtggtagtgtatggaccctttgtaaagggagagaatttagatttttttttccccttcaagacctcttgcccaggctggagtgcaatgatgtgatctcggctcactgcagcatccgcctcctgggttcgagtgattctcctgcctcagcctcctgagtagctgggacaggcacatgccaccacacccagctaattttttgtatctttagtagagatggggtttcaccatgttggtcaggctggtcttgaactcctgacctcgtgatctgcccaccttggcctcccaaagtgctgggattacagacatgagccactgtacctggcctagattttttttaaccattttgtgtggcatgtctttgagaaacggagattgcaggacctgtattctttctgcgttttgctgatgtaacttgatacagtgaaagagccagaacattgcgagggagtgaacagggaccatgtgcattacagtctttcaggtatcaggtatctcaggtgagcgatttagttgttgttggattaaagtcagtttatgtttgaatcctgtaacaagtgtttgtggtgtcgcatttccttgagaattggataacgtgtggttttacataccaggcatgaggttgacaatgtgatcatcctctcttgatgaggatctaagtttcaaatctatatttttacccaaacctagagaggcagtagggacatagatatctcagtccttatctgagccatgggacaccggcagattgtttaacttctctgagcctaagctctgtaataaaaaaagggagataacgttccccctcacagaggcattgggggcatgagcgggatgatggggtcagacatgtggtgcttagttttagtgcctggttgacattagctgccctgcttgctcttcttcctgtgggtgacagaagtcacatctgtaccctgcattgattccatacaccctgaaaatgaggttcctctccagttaagtttcagtggagagttactcaaggtgaaggagctcttcctgggcgagcctgagggtcccgcttggtgaaggaaacgtcgtgaatccagcatggcgaggtcatctcctgctgtgcagttgacacctgctctttcagctgcttcatctcacactgacggtaccagcaccctgtaatgctgtcatatcggtcagttctgaacaaagtgtgtgtcgtttcttccaagcaccaggggtacctaacgaaagcagggcatttggttgttctggggctaggcgattctaaaaaatgaacactgtcaatgtggaacccttcagtatgaacgttctgtctgcactgtagccctcctccagccttggcactgttgaaaaagaaatttacatcccccaaccccgggcttttttcaaaatgagggcggatgacccgtgtgatggcgaaacatcagctacttccattccttctcaactgaaattactttcttggctctgtgctcctatagcatttggctctattttaaaacatttcatcccacttcatagtatactcaggcatttacatatatttttctgatgaattacttcttactcattttggtttttcccaccgtaatatgttgcttctggtgaaccagtgactatttaatgaatcagcgagtcaaacaagtactcccagctctgtgcctgcttaaataagctagtattttacttccagatgaaaaggaatacactgcttctagctttatttcagaacagcacaccatctgcagataaatctgttgaaggggaaaccaaggacaccctctagtggcctgtgaatcccaagacggatcttgggggtgtcagggacgtgtaactgggggaggtggagcagggaagctaggcttgtatttgctcacaggagccagaactgtttctccctgtgacttgggaccattatacacaccctgtccttgagaagtgtaaggagagcccctcctctgaacaccaaatgtatcattatgttaattgtttttctgcaaaagcctgtcattaaaaaaaagagggagggccgggcgcggtggctcacgcctgtaatcccagcactttgggaggccgaggtgggcggatcacgaggtcaggagatcgagaccatcctggctaacacggtgaaaccccatctgagggatcacattagcaaagcaaacctccttcacaaaaccagggggcatgtgtggagttaaacagacctgtgcccatgtttgtgtaggagctgccttcggggcctccaagccctgggcagatgagtaaatacattaaaaaacaagtaaaggaagtccactttctctctatccctttcctgtggaggtcgcagtaatgattgtcccacagtgatgattgaaagtgcatgaaactggacaactgtccagtctaactgcctgtcagaagaggcatttacatcattaaatgggctgcccaccatgacactcgccaggccaggaatggagcatctccctgggtgtcacactgtgctggaggccctaagaggagaacctgcaggaataaaatgggtcttcccttgtaggcccaccagctgcctgaggaaacagaatccagtttccctttatggacttcagtgtacagtaaatcctgaatgttccagaaactcaaaggtttctggaaacctgtgactttaagcaaaatgatgtataagaaaccagttttaccctatgccaattgatgtaaaccagagttcagttcctaccatgtatttctgatcatgagaacatcaccaaacttttgaataaaggcccagaacacttctaatattaaacattgaaatatgagcgatgcatacatttaagaaagattctggctactaagtgggataaagaaagatcataaaaaccagtaagataatgattcacccacttattccagttcagggtcagaggtggctggagcatgtcctggcagctgaagtccagggtgggaacaagccctgaacaggaccccgtcccactgtgggacgcagtcacacccacgtccacactcagtcgcagtggggcctttgagacacagcagttagccgaacgtgcacagctttgggatgtgggggaaaccggagtgcccagagaaaacccaggtggactccacacagacagggaccctgcctgggaattgatttttttcttaacattataacaaaatgctgttattcgagggcctgttgtgcctacaggtggagatgaaaactcatggcactgttgagggaacccactgagaccacgtatctcacacacaagtcagccagcaccgcagtgagctcagtgcacgggttagcgctgtgtggacggggagcatgtgccgggggacgttgaggcacccgccttaacctaggccctgtagagcgggcagaactggagccggagcaggagggaggcagtgtgataaaagtgccagagcacaagttcaccaggtgcccctggaagtccttcctgggctgtgaagcatgctgcctgctcaggtggaacgggcaccctggggcgtgatttcctctccagctgcaccagccagcctcacgctgcggcgtgtccaggagccacatgcacccaaggacaagcagatttgaggcctggcagacgctggcaagagacctctgcccactcagttccgtctgggtgctgtgggagtaatggcttctcatcttaggctggcccatcttcaagggaccccagggtagacaggatctctactccctgcctccagtggcatgtccagggagctcaggctccccttctggggggccagttgttccacggggatttagggcaggtacagaaaagtcaacaactgctccagcagccatggccccttgccatagtcagctgagtgagagagcggaggtcaggagggaaccgtgcggggactccagctcgaaggggagcagccgcatttgtcctcagattgtaggcagtgctgtgttacaaatggatgcaactgatctgcccctgcctggctcttgcctgattctcaagattcaaagagtccctgggcagtgaccctcaaccttcagaattgggattgtaaaatgcatgtactctgtgaccagtgagctgctgtttcgctctccctcttgtaagttcactgggtctttccaaggcccgggacccactgtgtgtgctgcaggtgtgttgacgcacatacgtctcatggtgctactgtgaggatgtattgtgtgcattttcgcaagtcagacttacaagtctagagagatgaaatacttattcaagttcaaagcagcagtgtgtggtgggagtgggatttgaactcaggcttctttggcccccttttgttcctgcttctgtaggctctttggatggggcggagtctgagcatgttgccacataaaggccagaaagtagaacacaaagaggactgccatttcatttcagttcatctgatagtgcctttcataccaggcatggtgcctacaaaaaagaggtcatagtccatgccccaaggagctcatgggcctgtcgggcagtgaggcaggcaggccttcatgtagagaatgttggaacagaggttggccagggctgcatggagggcaggggcagggccttcctgggggaggaggcgcagggcatgcggattggaaggacctgaataagaagggtgtggaggtgacgagggcgacagtgaggtcagatcacagaacttaggagtgaggggagggagacaaggcagagaggcgggtgggctgagagaacatggggagttgtccccctggccagttcccaggaggtcgcagtgaagaccagtgcagccgtagaaccacatggcggccactcccgctttgtgtttcggggccagcggtgcttaccagggacatggcgcaggaaccgttaacatggccttagacaaagggaggccggacggcgggtagaagcccttcatgatttgcaaggcaattacgtttggtttcaggaatgcaagaaaggactacatcacagccaagtacatcgagaggagatacgcaaggaagaagcacgcggataacgcggcgaagcttcacagtctttgcgaggccgtcaaaacgagagatatttttggattgctccaagcttatgctgatggtgtggatcttacggaaaaaatcccactggccaacggacatgtaagagtgtgggttgttgctactttaaaaaaaaaaaaaaggccggccacggtggctcatgcctgggatccagtactttacttcaggaggccaaggcggaggatcctttgagctcaggagtttgagatcagcctgggcaccatagggaggccccatctctacaaaaaaaaaaaaaaaaaaaagtaaaattggccaggcatggtggtgtacatttgtagtcccagctactcaggaggctggggtgagaggaatcggttgagcccagaaatttgaaactccagtgagccgtgattgtgccactggactccagcctggccgacagagtgagaccttgtctcaaaaaaaaaggaaaactggggcactgtggcaggtctgtggaatcagcagtactgaccaaagctgggtaattctccagaggaagacggcacggagaggggtactggggtagaataaactagggttttttcttttcagtaggaaaataattgtatctatgttcatggggtatgctgtgatgtttttgatctatgtttacatcatggaatgattacatcaagctagctaacatatccattacctcacaggctcatccatttttaatggagagcacatttaaaatcgactcagttttgaaatagacgctatgtagtcttacctggagtcaccaggctttgtagtagatctgcaggatttattctccttgtctaaaactttgtacccacctagtggtttattcttacaccaaaaatgtaatgccagctctggaaagaaaacccatctccaggtggaggagaagacatctcagaagctaggcagcctgagagggacccctcatctgcaagcaggtttaacctgagcttcatgctaacgagagaagctctctgagaggggcggttccctggaacccacaccccactgtgctccccctcagagggaatagagtaggagcaagacccctcctttcctgggggagctgtcttgagagggtgggcatccagctggagtgggtttgcagtaacataccagcacccaagtggggtggcatgtgtccagattctggtccacaaataccctgtagatgcacatttggtcccctggaacctcctgacctcaggactgggctggctgcctatcagcaaggatgcctcacggctgcagcatctttctcttggtaacaggcatgtccgtgcaggctctgagctggtcccactctctccccatccccagaaagaactcatgcccaccaatgcagtgtggagggtgcccagcactgagctgtgctgccgccagagggcccagcaggcagggcaggcggcctgggaagcaccttcctttgccctcacctcctgtcttctgtatctgtccttctcctctggttctctcacccacccacctgctgaaacaatccttgttcatctcttctcccccacctgccaggtgtactttcagaaaaggcagtggagttggggaatccccagtatgagttggagacagtgcagttattagcattcgtagccttgtctgtaagtgtagaacgcaaaactttaagcctgcttaagaaacatatgtttctactcaaggagcaggtaaagagattggattgtaggtggcctgggggaccttcctggatcctttgaacaagattcttgcttgcaggcagggatctgccttgtggtgctgatgcagggatggggacaggtcgattgagaggacttagaaatgaaactcctgaacttctcatttatttcccatggagtcaggagaaacaggacgaatctccaaattgcacgttcccaagggcaaagagcttgtgtagagattaaagagactctatgtaagagataagtttctcgaagggaaagataaaagacttttggaagagttgtacacgatttcaccggtgttggacacagaattgaatgctcccattagaattctggaatgcctttgtttggtttttcaggagccggatgaaacggccctccaccttgcagtcagatccgtggatcgaacctctcttcacattgtagactttttagttcagaacaggtaggtgttctgaaattaagggaggcactcgttttctccttggtatttctggggaaggaatcggacgctgcctcatcgcttctgatgtgttgtcaggagaaccttcccagttctaaacatgaattaaagacagaaaaaggactgccaggtgtgaggtactccatggcaatcctttaaaaaagcactagaaactcttttgtggtaattgcagggtccaacttctagtgtctggtactcagggagacaccaagtagatatggctactgaacttggggaccccatgaccaccctctgtgcacaggggccgtcctcgcctcatcctgtgagccaggtcatcgtactgcgcaagcagtgtcctgagcagtagggaggtagcaggcaaggagggatccacacattagccatggtctgagccagagattagaaaccagagcactggattatgggtgttttgtttgggtcgagaagttgtttttatgctttgattagaaatggcctttagagatgtgcacaggcagtttaccacagatctgggagtccccgtggtttggggcatattgcttcagtcatgtgttacctgcctggcagctgaaggctggacttcaagacccctcaacgtgtattttgactccctgatcgtggtttgagccatgtgtgtactggaggaggaggaggtgctgttaaaagccacagaaattgctccaaaggaaatggaaaattccaaaatgcaaaagccatgggatagtttgcattttgtgtcctctgctttttcctcccatttctgagcagaggagtgaagaaatggccagaaagtaggggagtgtggggtggtcaaccccaagacctgcagcttcttcctgaggaggctgagttcactggactcgtggtggaagctgccctgatgccccatctctgagtgccagcccggctcctagaacgcagcaggggtttcgtaaacatttggttgatagctgcgtgatgcctctccctccatgcacattttcagggggcaggagagggaaggtcccagtttctttttttccagagtggaaggaggacaaaagtgggggagaattctgaaaatgaaacacaccccccgctccccatgcccacaatttggtgaaaaagaaactccttttttgatattgaaaatgtaattggtttccttctcatggaagcagcaggtgccacttcctgagatcgcctttctgtctccactttgtgcaggggcacaaagctcactgcccctcctcagaatgtgacagtggccatgtttgctaggattgagggcctgtcccatgtctgccaagcctgagcaccttttgtgggtgacctggtcttgtgatatgttggaagaacttttgaaaatctcaagattcccctttagcctgttttcagagggtattcccagggcaaacaggccgaggagcctggggactctgggctttgggaaagtgacttttccctttcctggagggaatatcaaataatgatagagaaaagctcagcctccgtcctcccgtgggacaggatggatgagtcacacaggcatccagaggccctgcatccagcacagctggccggcctagcacagcagcctcggcgcagccagtgggacgtgagaaggacgctgggctctaggttcaccccggtagtgcactgccccaccttggccccacatgctcagcaacaacagggatgcccccctccccttttgacctcttctgccatcatcgtgttatttccctgatgaccttctgctaaggcttccccagccatgtaggcagggacggtgccaggtcccaccaccttggcgatgatttacagaaaccgttcactcggggactgtctgcctttcctgtgcccgtagcccaggctccctgccgggcagtccctggtcgtccagcctgtgacacactatgctctctctctgttcctgttctcgggcagtgggaacctggataaacagacagggaaaggcagcacagccctgcactactgctgcctgaccgacaatgccgagtgcctcaagttgctcctgcgggggaaggcctccatcgagataggtgagtgggcccgggccccgggggtgggctcagctgcaccctggcctctgcctcctgtctgccatccaagcgctgctcttggaaacagggccaaccctgtgggctcttgttagtgccaaagagaaggagaacctaccgctaatgagaaagagcctctccctgcctgttccacgaggccgcattcaccatctgttacttagactttgggcgcgtttacaggcattttacagatcataagacaagcaaagggtgggtcttgcagctctcacggatgccaggtgaatttggacaaggttggggaattttgacctgttcacataccctgagtctactcacccccacctgaggccacacttggcccctttcttggctctgggtttagacggattacagggggagatgctgtttactgccctctcctttcatttgcaccactgcttcctccatgaagggccctggttgttacttggccccggtccctccctctctcgaggaccccgacatgccaacagccaaggcacagttgtgccttgagagcatccagctgttgtcccctcaggaggaagtatttttgaaggactgttaaataaagaggaaagaatagaaaaaagacacacatctgcctgagagccgtgcttatcattaaaaaactaataatcagacctcattgactgaggcttatttagaagaaattataggccgggtgcagtggctcacgaggtcaagagatcgagaccatctggccaacatggtgaaaccctgtctccactaaaaatacaaaaattagccgggtatggtggcgcgcacctgtaggcccagctacttgggaggctgaggcaggagaatcacttgaacccgggaggcggaggttgcagtgagctgagattgcaccattgcactccagcctggcaacagagcaagactccatctcaaaaaaaaaaaaataaataaagtatatactttcagggtttatagactgcttgagagaaggtttaaaagtttgttatattgcagtgcatggaaataggtgagcagtgcttttcgttagaggtttatgatgaatcgctttattcaatgagttacagtttggatgtggattttaattaggtggctgcttcaacagtttttgtttttgtttttgttttttgttttttttgaggcagagtctcgctctgtcaccaaggctagagtgcagtggcacaatctcggctcactgcaacctctgcctcccaggttcaagcgattcttctgcctcagcctcctgagtagctgggaccacaggcatgtgccaccacgcctggctaatctttatatttttagtagagacggggtttcaccatgttggccaggctggtctcgaactcctgacctcaaatgatccacccacctctgcctcccaaagtgctgggattacaggcgtgagccactgcgcctggccagttttagtttcttgattagttcaaacttcatcttttaaagttttaccttctgtatttagctgtagttctatacaattacaagatacattcagcctcgactaggtcaaactcactgtggatttcattaaccaggcccaatttaatttagtgctgcctttctgttccttttaaaaattgtcctggatgtcaggcctttgctgggttttgccttaacgcctcctttgctcgcccttgaattttagcaaacgagtcaggagagactccgctggacattgccaagcgcctcaagcacgagcactgtgaggagctggtgagtctcccaccacaaggacggggtggggcacctgtcacgggacagggagccaagcctgtcctccttgggcagggtttgctgtgaaccagtgtcctgagcagagctcagtgtttctgatgggatgagccgagaatcagcctgccttggagaaggtatgctagggagtctacagggaaacctagggggacccacccctcgcagtgagacttggggtgtgagtcagtgtttgctggttggccgtgttggtaacatcactgctgtggtgggacaactggaacagaggcccgaggccaccacaagggcctgctctctggcctccgtaagctgtttacttgctactttgcaggacatcaaggccaacctcctttctttgttcctcagccccagatcatgtgggttgctcaataccatcttttcctgttctggaagaaaagacaatgtagacagtagaaagagcccaccaggccaggcagccctggccttgccgggggctccccagcttggcttgggaaggaaactctcttaggctgtttccttatttctacagtgcagtcagttataccagtatataaggttgttgtgagaattattatcaaatgctgtaaagcagttgacacacagcgctcagtaaatagattaaggccaggcacagtgactcacgccttgtaatcccaaagctttgggaggctaaggcaggggatgatggcttgaggccaggaattcgagatcagcctggcaacatagtgagactctgtctctgcaaatgatttaaaaactagcaacgcatggtggagcatgcctgtagccccagttacccaggaggctaaggtaggaggatcactttgagaccaggagttcaaagctacagtgagccataatggtgtcactgcactccagcctgggcaacagagcaacacgccatctccacaaaaacgtttcgaattagctgggtgtggtggcacgcacctgcagtcccagctactggggaagttgaggtgggagaatggacttgagcttaggagttcaagactacagtgagccatgattatgccaatgcgcaccagcctgggggagaaaaaaaagaactattaataataaatgctatacaagtgtaagataagtaacaggtcctctttctaagcactgtacatccacgagctcatttaatctttttttttttttttttttttgagatggagtcttactctgtcacccaggctggagtgcagtgacatgatctctgttcactgcaacctccgcctcccaggtttaagcaattcttctgcctcagcctcctgagtaactcggattacaggcacctgccaccacgcccagctaatttttatatttttaatagagacggggtttcaccatattggtcaggctggtcttgaactcctgacctcaagcaatccacccgccttggcctcccaaagtgctgggattataggcgtgagccaccacacctgacctgtctcatttaatcttcatagctaccttatgacatagtttctgctgttgtcctcattttacagatgaggacacaggcacaggaaagttaagtgacttggccagggtcatgtagctactatctggttatgggggaaattaagccctgaggtcctgagacacccatagtgtgtaacgaattaacttctcttctgcacatgtagaacggaactagctatctaccttccttgagagaactgagaaaatagccacacagatcattttctacagcgtttaattctctcatcctggttgaaaaggctgggtttacagtgaatgagcacattcattctcctggggttgagctttctcccatatggagtatggatacttgcaggctgatcagcatcctttagatctcaaatatcctttgcctgttgttttggggaaaactctagccctgttttttctgtacggttacactgttgtcacaacaagcaatacagaagcagactgctgtgaccaaaggtgtggggttctcccccgaccccatacaccaattgtagtcgcctgacaggttcttcttgcctgctgcatagattaaacccaattcatgagacagtgtgattgcagcagagaaagagtttaattatggcaagctggctgagcggtgggaggacaggaattattactcaactgtgtccccacaaaggctcagaggttagggtttttcaaggatggttggatgggcaagagggctaggaaatgggtgctgctgattggttgggagtgaaatcataagagtatgagaaacagcccttgtccactgcatatcatctcgggggggccacgggactgtttgagtcatgagtcaggttcagtggagtcagttggtcaccaggatgcaaaagtctgaaaaaatatctcaaaagatcagtcttaggatatgttatctataggatcaattggggaagtcacaagtatcgtggcctctggtgcagtaaacaatttttttaaaaaaagacagtgtctctctgttgcccaggttggagtgcaatggcgtgcttgtggacagcctcaaactcctgagctcaagcgatcctctcacctcagcctcccgagtagctgagactacagatgcatgccaccacgcctggctaaaaaagtttttaaattttttgtagtgatggggtctcgctatgttgcctgggctggtctcaaactcctggctcaagcagtcctcctgcctcagcttcccaaaatgctgggattacaggtgtgagccactccactggatggtaaacaattacattaatagagaggcaagctgcacctacattttagcagaattcagacccttcccataatcctaatcttgaggcctttcattagtcttccaaaggcactttcaagttccctaacaagaacagagtcagttttcacatgcacacgtatgtttattgcggcactattcacaatagcagagagacttggaaccaacccaaatgtctgtcagtgatagactggattaagaaaatgtggcacatatacaccgtgcaatactgtgcagccataaaaaaggatgagttcatgtcctttgtagggacatgaatgaaactggaaaccatcattctgagcaaattattgcaaggacagaaaaccaaacaccgcacgttctcactcataggtgggaactgaacagtgagaacacttggacacagggcggggaacatcacaaaccggggcctgtcatggggtggggagacgggggagggatagcatcaggagatatacttaatgtaaatgatgagttaatgggtgcagcacaccaacatggcacatttgtacgtatgtaacaaatctgcacgttgtgcacatgtaccctagaacttaaagtataataaaaaaataaattaattaaaaagaaaagaacagagtcagttttagggagggactattaccatccttgattcaaacttacaccacaaactaaattcttcccatggttagcttggcctgtgcccaggaataagggaggacagccagcctgtgaggccagaagcaagatggagtcagccatgctagacttttttcactaccatgttcttgtaaaggcggtttcacaagcagcagacaccagctggctgtcctccagttcaattagacactatctacttggaggtagtgttagatcccacaggctgggggctcagtccccaagactgtcttccaccccagacaccagtcacaaatcaacctccagaacttctgaccaaccggcttcaagttggggttcccacagccccctctttgggtttgaataatttgctggagtggctcatagaactcagggagacacttgtgtttactggtttattataaaggatattgcaaagcatacagatagagaggtgcgtagggcaaggtgtgggggaggggacatgggggttccatgccctccctgggtgccaccctccaggaccctctgtgtggtttgccatcctgaagctcgagaaccagtcctctttgatttttatggaagcttcttggtgtcagcatctcttcccccagggtacagggtgagaccctctctggggagggccttaagacccacagtcagaaaagtgggggacgataagagtcctgccttggggcaggagaagttcagagagattctgtctcctgaggccttaacactccatgttataaccgaagactgtaacaagggatttgagagttacgagccgggaactgtggatgaaaactaatacagtttacaaagcctttgctgggacataccagctttgagtttcaaggttacgctgtgaagtaggcagaggggcgggggcttcacctgagacccagagatttccatgcatttgccttggactagaaggcaggcctcctgcctgcacacttcagtgggtccagatgcatggccgagtgtatgagcaacagcactgaccatccctctgttctctcagctgacccaagccttatctggaagatttaattctcacgttcacgttgaatatgaatggcgactactccacgaagacctggatgaaagtgatgacgacatggatgagaaattgcaggtctgtgccaggttgctaaccattaagagttttgatcagcttcatccagaacagtgtgggtcctaatctgtaattaaggcagaaagctgttttatagaaatgaaaatgtagcttactttatgctttcattgatctcagtaggctcttggttttacccttcccactaccatctcctgtctcccagctcctgcacccattaatttaaaggaatggctaattatgtacttataggcagccttttgctacaaaggaaaggtgtgtgtggcgggggggttgattccagtggatttagaggaaggtctcttgctatggagtcatgtcataaagagccagatttcccccagtctaggtgatcacattctcctggttgatcttataaaaacatcaactgaaatcatcagacgacctttagagctcactgggtccaaccccttcctttatcagtttgggatattgaagcctcaagagaaaagttgacttggccaaagtgaagcagctatttagaggcaggcttgggactgcacgaaggctcttgcctcctcctccagctcccttcttaccatcctcactgcttcatacgcaggggtgagccccaggaaggttgctgccttcacgcaggacttggagctgagagtcagacttaggccttgtgacccaaagccctggctcctagccgcgacccacttccatctgtccttcagcatggtgcttcgaggcatgtctggaatgtgctctgtgctgaattagtggcaaatgccacattaaacacattttcatggtttggcttttttttttttctgtaatgcattaatgttctgatgtgtattgaggatatctaattagatggatggataggtcagtaggtaaccagatggcatttctgaaacctgttggactgtctgctcatggagttaacatccatacttaactgcttcttagaatacagaataagaaattacttcactgagttagctacaaaacactgtcaaagtgagaagagttgactgatttcatacttaacctgccttaaaaaaaaaaagctggaagcagtctgccccagcctgcctcttcatcaagcggtcagatgccacattcccatttgatgagcagtgatgaagcaggttgcatagtccaaggaaaagcacaagagcaggggctggtgtggagtcctaagactcatccacgctgctcacctgattctcagcagacagcagccgtgggctttgcaatttagaaatatgtgtgaagaaccactgggtgcttagttctgcacacctgagctgggtttgaaccattggtttgtccagaacctagaaagggttggtggtcctgtgagggagaggcagggctgccacagttcatactgagcacctgctaagcacctggcattgtgctagaaaagcactcgtcatatccagtgaacagacaagaatgtggtcagcaaggttgagtcatttgctcacaatcatacctagtttaatgaagctggcatttgaaatagaagttaggtctaagttacctgagtcatcattccatgcattcacttccaagaaagcacatgaccggccgagcgcgggggctcacgcctgtaatcccagcactttgggaggctgaggcgggcggatcacgaggtcaggagattgagaccatcttggctaacacggtgaaaccccgtctctactaaaaaatacaaaaaaattagccgggcttggtggtgggtgggggggcgcctgtagtcccagctactcaggaggctgaggcaggagaatggcgtaaacccgggaggcggagcttgcagtgagctgggattgcgccactgcattccagcctgggcaacagagagagactctgtctcaaaaaaaaaaaaaaccatataaccttcaggggggagcaggggtggccaaactcttaaagggccagatagtaaatattttaagctctacgggcctaaagcgtcacagtccatgttaacaattactcagctctgccaggatggctcaaaagcagccttagacagtatctaaatgacaggacatggctatgttccaataaaactttactgacaaaaaacaggtggtagtccataggccactgtttgctaaccctaatttggaggaatctcaggagctcctgttcatatgggaggaaaacatcgatctctgctgaatgagccatatagctgttggagattgagtgcagcgggctggccagagctggccaccctgtggggtagcataagaaggcatgtttgggaaggggaacttcagggaaaatgctgacttaggttgagataacttcgactcataagataaatagcttatattttaaatccatcacagaatggagaattttaacctgtaattaacagattttttggtatgtgtgtgtttactagtcagttcttacactgctgtaaagaaatacctgagactgggtagtttataaaagaaagaggtctaattcactcacacctccacatggctgggaaacatacaatcatggcagaaggggaagcaggcacctcttcacagggtggcaggagagagagcaagcgagagcagggaaaactgccttataaaaccattaggtcttgtgagaactcactatcccaagaacagcagaggggaaccgctgccatgatccagtcacctccttccctcgacaagtgaagattacaattcgaggtgagatttgggtggggacacaaagccaaaccatatcagtgtgtgtttccttcacgagacacaaggaggagtgaattttcactcttgcagctctcacgcaacttgtagctctcaggcaacagttgagagctcaaatggtaccaggcccagcagagttggtgtcagtgaggttttcacccctgtgttgaatgttatcaccaggagcagttcatatttgtctcacacgcctctgccccaatgttctcctgcagcccagtcccaaccggcgggaagaccggcccatcagcttctaccagctgggctccaaccagcttcagtctaacgctgtatctttggccagagatgctgcaaaccttgccaaggagaagcagagggctttcatgcccagcatcttgcagaatgagacttacggagccctcctgagtggcagcccacctcccgcccagcctgcagcccccagcaccaccagcgcccccccgcttcctccacggaatgttggcaaaggtatgaagctgtccgtcatccctgtgaatatatagagggtcttgttttgtggtttgggaagtttgcagctgccctgcctccaactcagtgacctttgggctcttttgttttgtagttattttctgtttgcttcctaaagggattccatcattcttatcaggccagatggtggtagagtctcttgatttgactcttattctgggcagagttgtggcatctgcctggcttgggtaacatgggaactcccccagggcagcctgaggtggccaactgggctcccggggctgggccaaaagacacactccttcaggtctcccctctgcacccttctgtttacctttctccactccttcccaggccttcattcttcctttttatttctcttctgccttcatctggtccagctcatggcccctgcgattacttcttacccatgatccccataaaagatattggggaacgatgctcggcctaattgtaaaatacaaaaccagccctgtgggcctaccagtgtcttagggcaaaaagcatgcttttcttacctcagctgtaacctggaggttttgactcaacaggtgacactttctgtttttagaaatacgcaaaccaaagctctcagaagttaagtaatttgttcattcctgaagagcagctggctacggtgcttcttgaaggcaggtccggcgagtgacccactcagctctgggctgagctccagtcgtggccatggccttcagagggtttcccacatgaaggaggctgctgagactttgatgcggggcggggggcccaggaaggacaagagtctgcacagagcatgtatccaggcattgtggccgctgtgagccgctgatggagtggagcccacgtccccaaatacatcccaaactgtccttatgtggtagctgctagctgggcaggctgggtcggtgcgtgagggtggctgaggccgggagacctggcccagggctgagcagacggctgcagctttgtgctgcacgtacactcggctgtgctgctgggcccatcttccctgccgtcctgggtgtctcacagaccctcacacggctctgcccctgtcattcagggaggcccagagaagtgacagtgaacctgtcatgtgagtcactgagtcataccccgaagaacaaacctgctgagagcagaccttcccccaggcaggcccagaagccagctgcttgctgtccccacacagcccacatcccagaccgcgtccatccctggcttgatgaggacgtccctgagcacagaaggcagctacaagatgaagccacacagtcgcatctcctccctgtcaaacccccaggctggctggtcggggcccagggtgggtgcggctttctccccgcctctcccagatcctgcaggcaggcatcaattttctacggcccacaatcaagatgattttgatcatcctccttcccagcagtggcttttgctgactgtgtgtgtcacgggaggaaagattttattttgttccactgggtcatggaggggtaaactcttaatctcctggtttcccgaagtcttggaattcaagggttttgattttttttcctttttctttttgccgttcctgtccctagcatcatttcttcttccagtaatgtaggtcataccccttacctgccatctccaccattctctgtgtagcccacatgtggtcttggatggaattctcacatgcagataaatagcaaatggagttgacagtgtcagccttgcatttggggcggacctggctccccaggggaggagctcgaaggcttcctctggacccagtggcctggcccatttctaggcctagcctttgccctacaggccgtgcacagcctccaacatggggtcacacctagcacctgggccctgtgcacctgagcttggaggtttgtgaggcagaagaagggcttgtgacctggaaaatgccatctcttgtgggtcacctgaacctgattggtgtcatctgtgtctgcttccagccagaaatatgtttgcgggagggagggagagagagcccctcctctagtgtctgatttgcactctgcccccaacctgtgccagctgggcacacggtgttcctcttcacatggtggtgactcccacagcccatgggaaggagtcggtgggagggtggagaggagcagaagttccagaagctccaagtgcagtgttcgcaagagaacattgtgactgtttatttccttcttcaaatgatactgatatttgataaataaactcaggaattttaaatttcatggattgagaaaacctgctgagaatagtccttggagcctcttcggtttcgcgagtatcagtgtctatcttccacatgccggagacaggagtaaaagcattgagggttctaggtagaagggtcatactgaccgtttcataagggggaggatcaataacgcagtgttctgtttctgtttttgttcgtgtgtgcacgtgtatgtgtgcgtgcatgcgtctgtgtgcatgcgtgtgggttcagttcagacagcctcctctgctaacaccctgtggaagacaaactctgtaagtgtggacggtggaagccggcagcgatcttcgtcagatccgccagctgtccatccaccgctgccccctcttcgcgtgacatctaccagtacgtttttttcctttttcctttcttgcccgtgggctttgtagatctggatggcggggggtgctctctggagccacacagctgccagcacagacacgtgccaagtgccccgtgttgtatggctccctgtggctcttgtgcagggctctcagctcccccagcctccttcgtcacagctgcaaacccctgcctgtccccacactgcaccaccaagtagcttcctcactcccttcctctgtcttccaaagcatttcagcaacatttcctcctttacacagtaccccagggtttctttttcctttggccatttggtgattttcaatattttggggacagtcacttggattagaatctggctttttgtttttcttttctttttctttttttttttttttttgagacagagtctcactccatcgcccaggctggatgcaatggcacaatcttggcttgctgcaacctctgcctcccgggttcaagagatcgtcctgcctcagcctcccaggtagctgggattacaggagcctgccaccatgctcagctattttttttttttttttgtatttttagtagagatggggtttcaccatgttggccagcctggtctcgaactcctgacctcaggtgatccacctgcctcagcctcccagagttctgggattacaggcatgatccatggtgcccagccttgtttttctttttaagacagggtctctctttgtcccccaggctggagtgcagtggcacaatcatggctcactgcagcctccaactcctgggttcaagggatcctcctgccttagcctcctgagtagctgggattattggtgcaagcgtattttttgtagagacagggttttgctatgttgcccaggctcgaattcctgggctcaagtgatccacccgccttgtcctcccaaagtgctgggattacaggtgtgggccaccacgcccagcctggcatgttttctttaatatcaacatgtggttgaaagtcctgaaaaccttgggtaaagaagcgggaggaggtttttaggaagaagtttttctccagtgtacagaactaaagtcttttttcactggatcagagaagcgagccctggatgctgccctgtctcctgctgcagcagccctggagtggggagtccagcatctctgggcttcattgcttccagagcatgagaattctagagccgaggtgctcgtgacttccttagagtaagttaaaattaaaagcagcccagccccagctagagtcagtgccatgtgtgcacatgccggcagcagagccgggagcagtgggtctgggagggtcttcagaggtttccaaggcgaacacaccaaaggccagaaggaaccactttcctgcctctccgtctggtggtccaggggctgcatttgtgtgctagagtcagacttttgagttttcctttaaattggaaaaaggaaacaataatgataaaaagaaagatcataagctggatcccttcatgtttccccacgccagtttcctctctgtgtagctgaaggcctcattcttcctggcttttcctggcagagggaaacccagcgccttatgtgttacccatcctgaggcccagtatgataagcccgacatttagagagggcttaatgcctatcaagggaggagagacggaggaaggagacttggactcacagcctccctccaggtcttaccagctctgccacccttgacgagagctcttcccctccgtgggcctcagcctccttgtctgtaaaacgtagacactaagaaagctcttcacccacccactccggagactgaggagccgttactaagttagtagctcccatctctcctcagatccaccctgcccagcagcccgatgaagtgggtagggcctcatccctttggccacaggtcagtcgatgtgcaaagcaggccctgcttccccgggcagagctgagggccccggcctcctgctgttgggtctttgagtggagagcaggaaactgctggctttcccccagggagttctagctgagaaaatactcactcacaggctgatagaaaaattgtcatcctaactttaggctcccagcttccttattagtttggaaaggactccctgcttcctccctgtgaatggttttctgaaaactggcaaggaaatagcagcaggtttttccttaggaaatagcaataaaaaactgaagcccttctcagaaaagcctccagtgaggaggcctgagtgggaagcctggcggctgaccctctgcacgtctctccctgtcctccgcagatcccctgacccccacgccgcccccacccgttgccaagacgcccagcgtaatggaagccttgagccagccgagcaagcctgccccgcctgggatctcacagatcaggcccccacctctgcccccacagccgcccagccgcctcccgcagaagaagcctgcgccggggtaagccacccccagccagctcggccatccgtgctcctgccctctgacctcacctgcccagggctctgcaggaatgtttgcaatccccagggctcctactccagcgtgggcgccacataactaattcatcggggctgaagggtcttaaaaataactggaggatttttagactgtaaaaatgtcttacaaatgtacattttaagtccacagaatgaattcagacaaagtgtcctcaacacacaaggcttctgggttctatttgctgctcaccccccaggtggtctctgtttctgttttctattttcccaaggttgttttgaacacatagaccctctgtggtgtgaggcgtggatttcccacaaacaaggacattgtcctacctcacacaataccacctgcaaaatcaggaaattaacacggatgtagaaacaccacccaatccttagacccaggtcaagcttagctgtttgtccaaataatgccccttgttgcagatgggtctagtttgtggctttttttttttttttttttttttgagactgagtctagctctgtcacccaggctggagtgcagtggcgtgatctcggctcactgcaagctctgcctccagggttcttgccattctcctgcctgagcctcccgagtagctgggactacaggtgcctcccaccacgcctggctaattttttgtatttctagtagagacgaggtttcgccgtgttagccaggatggtctcgatctcctgacctcgtgatccacctgcctcggcctcccaaagtgctgggattacaggcgtgagccactgcaccaggccccagttcgtggctcttaatctggatctttatggtgggaaatggttccttttagtggaaatgatatttagaggccaagttctgggggctaggtggagagtcactgctcccacacaggccctctgagctgttagaacttggaaatatacgcacatgtacatggatacatacatacaccacttatctctctattccgtatatttctgtattgaaatccatgagttcacattgacatctctgatttcagttgttctagtaacaaaccacaccagactgacagacatgaggcacagccagtttattctgctgacagattgtcaggaatttggatggtactgtggggtcttcgtcttttctccacagtgtctggagccttcgctgaaaggactcgaagcctgggggtggttggacacaggaggtgactcgttggctgggggttacggtcagagtctcttcacgccccccgtggtagctgacgctgcctgtcagccagagcctcagctgggctgtgaccagaacacctacatgtccctggcatgggcttcctcatatcacggtggctgggtccacggacaggtccccagagagaggcctggccctggaagctggcacggaatgacttccgccatacgtcactgctcagttacaagctcagacacagtcggggcagagaggactgtggagtggcacaaggaagtcatcagttccacctctcaataaagaatttggggccaggcgccatggctcacgcctgtaatcccagtactttgggagaccaaggtgggcggatcacctgaggtccagagtttgagaccagcctggccaacatggcaaaaccccacctctactaaaaatacaaaaaaattagctgggcatggtggcatgcacctgtaatcccagctactcaggaggctgaggcaggagaatcccttgaacccaggaggcggaggttgcagggagctgagatcacgtcattgtactccagcctgggcaacaagaatgaaactccatctcaaaaataaaaaaataaagaatttggagactaggcaccatggcccacatctgtaatccctgcactactgtgtttttgtttttttgttttgttttgttttgtttttcttgtgttttttttctttttttttttttttttttttttttttttttgagatggagtcttgctctgtcgcccaggctggagtgcggtggcgcgatcttggctcactgcaagttccgcttcccaggttcacaccattctcctgcctcagcctcccaagtagctgggactacaggtgcccaccaccacgcctggccaattttttatatttttagtagagatggggtttcaccgggttagccaggatggtctcaatctcctgacctcgtgatctgccctcctcggcctcccaaagtgctgggattacaggcttgagccactgtgcccagcccatccctgaagttttttaggagtagagaaataaagttaaacttttacttagtccctctgtttttcaagatattcccaatagccgcacctggtatcccccatccagacaccgtccgttttgccctctccaagaatagaagcttcctgtccttagtaggttgggcagggcagcggctaaggctactcagagctggggcgagattccaggggttcaggagctcctcagacagatttttggctaattcttctgcatactaccttgcctttctccccttccagagggtcctgagccttctgaggacacttcaggactacagataggagcatttcagggccttcctcactgctggagtgggattccattcctgagatcaactaggttgactgtgatttatctttcactctgttgcccaggctggagtacagtggtgtgatcacggttcaccgcagcctcgacctcctgggcccaggtgatcctcccacctcagcctccgcatagctgggaccacaggcacgcaccaccatgcccggttaatttatttttatattttgtagaggtgggggtctccttatgttgcccaggctggtctcgaactcctgggctcaagcagtcctcccaccttggcctttcagagtactgggattacaggcatgaggcactgcgcctcacctcttttaggtttaatttttaaaaatccttttccttggaaagaaatggaagtaaatgtacttaaatctgccattttaaccagaagactcccaaaactttttaaatgctactttgcaagataactttctaaaatataacatgcagggctgggcacagtggctcacacctacaatcccagcactttgggaggccaaggtgggtggatcacttgaagccaagagttcaagacctgcatggccaacatggcaaaaccctatctctactaaaattacaaaaattagccgggcatgatggcacacacctgtaatcccagctactcgggaggcagaggcaggagaatcacttgaacccaggaggtggaggttgcagtgagccaagatcacaccactgcactccagcctgggcaacagagccagactccgtctcaaaaaaataaaaataaaatatgcatatctgtgccctcctagtcttaaacagctactgaattatgctgtaataaatgggctttccagtgctaattatttctgcctctataccaaagtggccacaggccatgcttctcttggcttctgggctctcttctgccttcccttatgactccctgggatttacgctttccatgctgctgtttttcgagagaaacaaatcacgtgttgaagtcctggctaaggagccgtcagctcccagcagttattgggactctgagaaccgtggttgtcagctgtgaggtgcaggttccttgttctcagaagcgttctagctggcgggagctggacaggtttcctctggaacacaattttacctggtttcacatctgactggcaggaaaaagggaagcagggcaagtgaggttagggctacccgggacagacggggatggacggagccatgtcgtcagcgcccagtggagttctgactgtaaaggaacacaccggtacgccctccttgtgaaggatgctatcccttccccaccaccggtgattttgtctctgggataaatgtgaattttcacacctgttctcttagggtaggagtcagcaaactatggctcacaggccacatccagcctgctgcctgttttttagggccatgagctaagaactaagaatggcttttatatttgtaattggttgggaaaaaaaaatcaaaaggatatatatatatatatatatatattttttttttttttttttttttttttgagacggagtctcgctctgtcgcccaggctggagtgcagtggctcgatctctgctcattgcaagctccgcctcccgggttcacgccattctcctgcctcagcctcctgagtagctgggactacaggcgcccgccaccacgcccggctaattttttgtatttttagtagagatgaggtttcagcatgttagccaagatggtctcgatctcctgacctcatgatccgcccgcctcggcctcccaaagtgctgggattacaggcgtgagccactgcgcccggcctcaaaaggatattttgtggcacatgaaaattgtgtgagattcacttcagcactcagaaaatattattggaacattagccacacctgtttttttatgtagtctggggctgctttcacaccacagtggcagagttgaatacttgaaacagagatgctagaatccacaaaaccagctgggtgcagtggctcacacctataatcccagagctttgggaggccgaggcaggaggattgcttgagactaggagttcgagaccaggctggaaaacatagtgagaccatgtctttacaaaaaattttgaaagttagccaagcatggtggcgtgcacctgtagtcccaactactcaggaggctgaagcgggaggatcacttgaccccaggagttccgaggctgcggtgaactgattgccgcactgcactcgagcttgggtaatagggcaggaccctgactcaaaaaacaaacacaaaggccaggcacagtggctcacacccgtaatcctagcactttgggaggccgaggtgggcagatcacctgaggtcaggagtttgagaccagcctggcccacatggtgaaaccccgtctctactgaaaatacaaaaaatttgctgtgcgtggtggtgcacacctgtaattccagctactcgggaggctgaggcaggagaattgcttgaacccgggtggcagaggttgcagtgagccgagattgtgccactgcactctaacccgggtgacagtgcaagactccatctcaaaaaaaaaaaaaaaaaattcacaaagcctaaaaagtttactatctgcctctttaaagaaaaagtctgctcactgctgtctcagaggatcaggccttccctgcgagtgttctgtagttagggatgactgccggccagggggtcagccaggtcagtgtagtgatgtctgcagagacatttacacccagagacacagatggaaaacaaatggctagactggtcaaatgggaggggtctttgttttatggaataaaacaaagttccttttcagttccttcagcgtatgagcaaaacccatgtgatgttttctctcccttcattctgggactgcaagcattgaggccagacagggttcattccgagcagcgaagggagtgtcgacagacgggagcgtacagtggaaagaatcccatccttgccttccccttcccttcctccctggtcttcctcttctgcttctccagcccccgtcctgtgcctggctttatgctaggtccaggagatccaccggggagctgaagccactggcactggtccttagctctggagttgacggatcttgtgtcacaccttttgcagatgaaaatgctgactctccagaacccatttatccagggctgccaggtggcaggttcgagatgagggacccctctctgccagccctgagaactacttcctcactcatgtgtttctaccttgtggctttggggtgtgctggcccagaggttcatggatggggcttgagcccgtggtcagccacattggttcccagaagcagggacggcagaggcatggacagcgctgacccagagtgctcggacccgtcctggcaaagccatctgggcctgaggttaaggttcagccctgccctttcatgtgatgggaccaaggcagggaaggggctgagcagactcggggcggggccagtggccagtgcccagcatcactccagaccctggccatcggtggcaggctcacgtggacagagtgctctggaaaagccctggttttaggatcagaaacgttgaatttagcactttcctcagggcctctcattcttccttttcccataaaaaagagacagctaagtgacagtggaggaaaccacctcacacactctgagcttgaactcagaaggttctctgataaaaggggatgagaaaggggcaggtgccctccggtagcagtaaatctactttttccctgtctttgtagggctgacaagtccaccccactgaccaacaaaggccaaccgagaggacctggtaattatttaatttgggactgagtttgtttctgcttggtccatgggggcaatgtgggggatgtttcctgccaggtggtcaggactgagggagggcccagctgtctgccattccacagccctcctgccccctcccctcctgccccctcccctcctgccccctcccctcctgcccccttcccctcctgccctcttcctctccttccttccctccttccttccttcctcccccactcctgccttcctctgctcccttctcctcctctccccctccctcccccatctcatgccttcctcccccgccacctgccttcctccacccctcccttcccctcccctcctctcaccctcctccctgccttcctcctccctcctccctcctgccatcctccctcctccctcggcctctgagacccctgctcctgagcagctcagtcctggggcccctcacctgtcccctcctgctgacatggcaggctcactgggggacactcgctgccacacaagctctccaaggtctgcatccaagtcagaaggttccctttcccctcaacagatcggaacacctggggaaacctgctttcagacacaccctgtggcttgtacattgtttacatctcatggctgtgattgatgggatgtcttaagctgcttcatttttgccctacagtggatctctctgcaacggaagctctgggtcctctgtccaatgctatggtcctgcagccccctgcacccatgcctaggaagtcgcaggcagtaagtgacgagccccctttcctgcctctctgctctagccaggggggtgcaggtggtttcacaagggctcaggggaagcaagtcttcccctcttcccctggctggggcagggcggggctcttcttggtacctgactgcttggatctgggcagctggtgggtttggccctcctgccgcagctccacaatgggcccactcagagtaccctgccccggccgcttcgtttcccagcccttggccccttctctctgcttggtggggagctcttcccttttctctccctggctcctgagctgcactgacctgccccaccttggcatctgcaggcttctcaggcctaggtacgggactcctgagaccggggaaggcagggtgcttgagctctctgccctgagagctgaggcctgcagccacactaaccgttgttccctctcctgacccagaccaagttgaagcctaagcgggtgaaagcgctctataactgtgtggctgacaaccccgatgagctcaccttctccgagggggatgtgatcatcgtggacggggaggaggaccaggagtggtgggtgagtcaagggtgggcctgggaggttcctgggggctgagccacgtccctgcccacctggctggagagacgggcttgcaggtgaggttttctcagcctgagcagtccagatgtagttcctggtgcctccgccccttagcatcctcaggagctgcttcctccatggacacccccttctgagcaggcctgattattccccagggtggcttcctcccctgttagggtgcagtttccacagcactcatgagggcctgaaatgacactccttcattttgaggtcttgagtttctaggtcatcaccccccattgctggattagtggaatcgggtgtctggagagagctgacctagagcgcagagccccaggcctgagtctggtcctgaaacaagctgtggccgcccaggcgtccagcagggtgtgggagcaagatgagtgccggccacctaagaattcagacttggccactcaggggctggtggcttggggcaggttgcttttatctttaagcattagtgggatcatctgtgacagggaggtcacacacacacagtctggtgcaggtgatcttgtgagcacccactaagcggcagctgcagacagtgagggcggtggatgaaccggcttgaatggggcgtggacagaaagccccaggctgagcccaccacacagtagacgcaagtggcacagctccgcaactgagctcagagcagacagttcagctgggaactcacaggatttaggggaacttctttgtcgagtgcgaggagtttggacactgtctttagtcactgtccctcccagaactcccactagtgtttaaactgcatgtcttcagcctccagaggcgctgtgagctctcagggccaggcagcactgccttcatttggcagagctgggttcaccggtctttcctgtggcctcgtttgcccttaatggattgaaagtgtctgtggcctgggcgcggtggctcacgcccataatcccagcactttgggaggccgaggcaggcggaacacttgaggtcaggagttcgagaccagcctggccaacatggttctctactaaaaatacaaaaaattagctaggtgtggtggcaggcacctgtaatcccagctactcgggaaccagccagctcccacagttgcccacaacccaccatccggaaggggcgccaacctgaccacaggcttagccatgtggaaaatacctgctcatttccaaaactggaaaatagaggcataaagaagaaaacagaagttgcccataaccacagcaccccccacccactccacaaaaagcccaccattcatattttggctgtttttagccttttatttgcctacatcatttacactcttgagatcatatttggatataatttatgtatctacccaagagggaacataagtggatagagtgaagccttccacaagtacttaactcattgaaatggggccaacttatacctttgccactttaggtgacgttgcagctcacaaacttgtgacactcagttcattcattcattcattcattgaaaaatggcaagtgggaagtagtggtcagacagctgacctgtgtgcctcccaagaacaggtgggggtggccatccccacgagcgaacatctgggacatggctgggaagagctccttacacgggagaggcctgcactatttgaaatgtggtgaggaaaaacggacaaaaatcatttggatgttttacctaagtaattccttgtcggaagagtcttctgaaccaatcttgcttttcttcaccaaacgctctatgtaatgctcttcaaagtttccaccaacatttggaattttaataacaacctacacttttctccatttcagattggccacattgatggagatcctggtcgcaaaggcgcattcccggtgtcatttgtgcactttatcgctgactgaattgctactgaacaaaagcattaacagttatgttcctgtttcgttattggtaccaaaactcttgccagataaccagtttcatgaactgtttgtatggcagcccatgttctctaatgccactgctctgttttaaaaactcagaggcaatttttacatatcagtaattgtttttataatttgtggttttcatgaaacattgctatgcatttattaggaaaaactgaatttcccaacaggtgaactgaaaagttattttaactattatacataatcaagatcctgcctctacggaattagctaaacctaaaaatgtttgcattaatgaataaattcttcctgcattccttggcccagttctggagttggtgacctttatcacaattattattttaggcggccagtgaactgctgcttcagaagtccatagcccagctctgaactttctcgataaaatgccatcagttcacctttaaagacacacattcctttgaaatccacccagtgtttaaaaagcaacttggaaatttacacattagcattgtactttctagccctaatttgtgaggttgcagctatcattatattctgcatgtatgtataacctgttgtgaacaatcatacttaacaaaactactgatggtttatgacaacgtagggtaactacagttcattctgttccaggttatataaaactgcatttcctgaatttggttaaaaactaaggatgatggattgcaaaacagttcttttaaattagtttatatgctttaggtgttttggaatttgccttcttgaacttcctgagtcacacagaaagcaactgtacacagtagaattctgtggcgcagaccatgctgtattaacacatcacttgctgtttcctactgagtgtaccactgccttcccttctagcccaggagaatgtttactcagtttagtgtcttgtatttctataatactccaacaggaatggtagtcacactgtcttgaaattgaatctgtccatctgtttataatcaagaacatatcagaaatatataggtcccaggtaatactcccaaacatcccactttttactgtttcaggccatcatatcattcttaagctacttggggtggtagtagaggattaggttgtctattataaaaccaaaactcattcgtttaatgaacttgactgtcatacctctatttagtaattgcgagggtaagattcatagtaggaatattggaaattttggcactctgagaataaataggcatatgatacccacttggacttttaacaaaagtaaaggaataaatttgcatataggcttggaaagtgaggcagcaatgctgttaactgcatttgttgtgatggtgcatttgattgaagcagcttgtctttattatgcaagactgtgtagagttttttttttttttggcattgtactttttgtttttgttataaaggaagacagaacaaactggaatgttttatgatgttgtatagcaatcgctttttacctttcaaagttccgggtaaaaatgtgttatatctgtagttttttgtttttgtttttttttaaagcactacatctgttttcactaattgttaatttctgtttgaacccttcatttaattttctcatagatttaagtaaacagatgtattttgcacagtgcacttatgtctattttaacaatcctcctgcatctgtattttatagtcagccttttgaccacctggtgccagctatataaggaataaagttgattcatatcaacattagaactccagtcccaaactaatctgtcaggttcactggtacataaatacctaggaaatatttttccagtctacaatttggtgctattgtgcagtaactaatagtactcttaccagaggagaaattatattaacgaccctgctaatatcctttcttagttatttgctccttgcaaattaaaaaagcaactaagagaaagaaaaacattgtagatatctatttatatttaaagtttatgtttcatgaactgcagctgcaggattctggcattttgcatgccattctccatcagatctgggatgatggctcagaacatgtacacagactaagagtaactgtgtgatctgttaaggggtggataacataatatgcagcttaggatgctattttgagatgtatgatattcagttcattcacctgattactttggttgcagcacaactgtatatattgtataaccgaaattgattattttcattgtccttaatgcagtgatttataattagagcatgtttaataagtttactcttcttgttaactagtcatttgactggaaaaaaataaaatacttttaaatggacatggttttatttttaatgtttttaatctttaaagttttgtatattgacagtcctttaaaaaaagtacactatcatactgtacatgggatctttacatacttttagcatgagcggtaatcttttaaggttctcttaactctaggaattgtggttggccagcatgttatcttgaccagacacttctgaaaatctgctttgtgtgtcttaagttggcaatgtcactgttccagaccagcatgaatcctggtctccagtccacacctctgccggacagaggtccatgccagtgataccatgactgggaagccaccactgagcccatgtcctcagtcttcctcaggccttcagtgtgtgtcactgagtggacctctgtgacatctcgtcttcctcaggccttcagtgtgtgtttgtcactgagtggacctctgtgacatctcgtcttcctcaggccttcagtgtgtgtttgtcactgagtggacctctgtgacatctagtcttcctcaggccttcagtgtgtgtttgtcactgagtggacctctgtgacatctcgtcttcctcaggccttcagtgtgtgtttgtcactgagtggacctctgtgacatctcgtcttcctcaggccttcagtgtgtgtttgtcactgagtggacctctgtgacatctagtcttcctcaggccttcagtgtgtgtttgtcactgagtggacctctgtgacatctcgtcttcctcaggccttcagtgtgtgtttgtcactgagtggacctctgtgacatctagtcttcctcaggccttcagtgtgtgtttgtcactgagtggacctctgtgacatctcgtcttcctcaggccttcagtgtgtgtttgtcactgagtggacctctgtgacacctaggcttctgtgacacttaggttaagcttattagaagttgaaaaagacaaatgaagttttttagcccagaaaatagatgacttcattgagagttaactcactgtgtaataggacacattttaataaacaaatgatcagcattttacacaatccattttcttcagaaaatctagagcaagggataacttcattatttgcataacatttcagcattgcagtttgaaaacagctgaactttcagatgaagttgacttctacttgattgcaggattcagggtttctcagatgttaatacagagtcaaaagcggtggataaaaccttgcaaatggcttgtgcttgttcctacattacatgaaagatagagtaagagcaacattcatctgtctcttcgtgaacttaatttggctagcagaggcacacacctgaccctcttaagacctctcctaagcaagccgaccacacatgcctgcctgggtcagtggaacccatactatgagcttccctgcacgtgggccctttctgccctccttcagaggaaagcaaacagcgactgcagcctgcaaaggctgatcacgcagtctaggagggcaacaacgttcggaaatggaagaagccttcggcccctggaggatacatttttcctcagctgctttgtttaccttttaaatcccggcacaagcgagtgctgccactggccctaacaaatatttcacaaacctgcactgtcttgccagccggctgacctccggcctaatattcattcactatccccaggccaagatattccatatataatggattgtatttcttcagccttcaaaaacagtagtccctgggtgttgcgacttgatgggcaagcagctaaccaaagtaacgaagtctcaccaggctgttgcactgataaacccacaggctgtattcctcattgcttgcatctgtggtcttcagagccagtaagctttttcccgcccccagaccgtcatcgtaacacaccatccggattattaagtagagagcatgcctgtgcaaaacatcctgcagaagtcaggaaagattccgagagatcaggactctcaaatgtttgtcagtcctgatgacacaccctcccaggcagagtgaggcttgaaacagcatatccataggtttctcaccccaagggatgtcctgtatgctcagtctcgggcaatgccttcagatcccagcaagccaggagtgcagtgatctaaactgactatcccagtgtctgtgcccaccgtccaagctgacagctgctcttaattgatgaggggcccttagttgaaaatgcattcggagccatctgtgtgtttgggggtggggggggcaggttgcatgggcccttccaacacaggagagaaaaggaagcccctattcaccttaagaaattggtcacgtttaagaccaactgccaggaatgtttacaaaccaatcactctgcaaacaggagtggccctaattataagggggctcttaatggcctgaattccctgttatctaaaacatagttttcttaataaattatattacttacatattgatctgatgttgatacttttatgccatacttggaaactcccataataaattcttcctccggaggaacaaaaggcaactttccatcttgctttaaagtaaaaataaattccatgataaagattaaaattacataatagtcttaagtctgactagtcactttgagtatctggccatcgcaagcccaaaccctttaaagaatgtggggtacacattagccaggcaagagtctctctcccagaggcagaagaaacatttccccccatttacaaaaaggttatttttatttttgagacagagtctcactctgtcgcccaggctatagtgcagtggcatgatctcagctcgttgcaacgtctgcctccttggttcaagtgagcacatccggctaattttcgtatttttagtacagatggggtttcatcatgttggccaggctggtctcgaactcctgaccttaagtgatccacccaccataacctcccaaagtgcagggattacaggcatgagccaccatgtgggccaatttatttatttttaaatcgaggtgggatctcactatgttgccttaggctggtcttgaactcttcttggcctcaggtaactctcccaagttggcctcccaaagtgctggcattacaggcatgagccactgtgcccagccgcatttttacagcccacaactctgagcaaaattcacatccatccctttcatgcatattgtttgtcttggagttaatcctaattacacactgagctgcttctcacaaaacctgctgatgttaaaatacctacatgagaaaaatgaagatcttcatttccacagcatagaccagtgttagcgtgtgggatgatcaggaagcagagcccacatatcctgcccagatgggaaggcgtgtctggtgatgccacgcctcagggcttcgggctggcaagtgctgctgatgagcagttactccactcacaaaaacatgaattggggttttcagctactcaggaaccgcagataatccctgacagcttccctggcggacgatccggtctcggctcccagaccggaataccacctacttcgtcttccctaacgtaagacgctgttggcaacctatggatgttctgtactgtcaatggttttgtggaaccactcgcccacattaaagacattacagtaaataagctgcatcccaataccttacttcttgggtcctcacaatgttacagtacccgcttgccaatcgcttcccacagtgggtttaaagcaattccaagaaccacggtatgggataatagtcaagctattgtcaatactggaattttagcaagcaaaaattctatggtgatatgagaaatttagtagtccttataggaatgaaaataatgctagtgtatttttgaggggaagaattattaatctttcagtacaacacttagactggttgtagcttttatggttaagaccacactgaacgttgcggctcgttcttggaactacaactttaagcgaaatcacgcatataacaaaaccatttttttttctcatcaacatcataaaacattataacaaaatgaccttgaaaaacgagttacttggaggaactaatctaggtggttttccaagaaccaatcaatgaggttacgtgaggacttaatgtagtttgttggaatgactttatattcccaactaaatgctggaaagtaattatacttgtccaaactaccgtgagttcttttttttttttttttttttgagacggagttctgctcttgttgcccaggctggagtgcaatggcgcgatctcggctcactgcaacctccacctcctgggttcaagcgattctcctgcctcagtctcccgagtagctgggattacaggcatgcgccaccacacccaactaatttttttgtatttttagtagagatggagtttcaccgtgttagccaggatggtctctatctcctgacctcatgattcacccacctcggcctcccaaagtgctggaattataggcctgagccaccgcgcccagcccgagttctctcttaaatggcaatttagattcactgatgtccttcagacagaagtatcttcctttactttcataaagatatgaaacttcatttcaggttttttttgagacagtcttactgttctgtcacccaggctggagtgcagtggtacaatgatggctcactgcaactttgacttcctgggctcaaggaatccccctgccttggccttctgagtatctgggactaccagtgcataacaccacactcagctgattttttaaaatgttttgtagagatgggggtcttgcccaggctggtgttttgttttgtttgagacagtctcactgtgtcacccagggctggagtgcagtggcacaatcttggctcactgcagcctctgcctcctgagttcaagcaagcagttcaacctcagcctcccgagtagctgggattataggcatgcaccaccacacccagctaatttttgtatttttagtagagacagggttttgccatattggccaggctggtcttgaactcttggcctcaagtgatctgccccccttggcctcccaaagtgctgggattacaggcatgagccactgtactcagcaattaaaattgttttttttgtagaaatgaggtttcactgtgttgcccaggctggctttgaactcctgggttcaggtgatccccctactctgcctcccccaaaatgctgggattacagacgtgagccaccatgccctgccacgctgtatttcatattctcattctctgtgatttaagagagtacacattcttaacactctctgaagttaaggaatcttggtattgcagttaatatccctcttttaatgcgcacataaaaatgtaatttcattttctagaaactccagaagcaatttactttctttttttttctctcattaccgaattcactcttttggctcatgtacttccaccattggcaagggtacagattttataacatttcacgtttatatatcttatacttttgatttaattttcattcttaattttccttcatgatgatgattttttatcttcttgattttatctttttgaaacccacctcatctcaattcttgttggaaaccttgcatgaataaacagatatgttaggtggacatcattatgaattagattattgagagacagaactggtctgatggtggtacggtaaggttttgccagattattttaaaagaagaatctatggaatataaccagtcaccgcaaccagctcctcatttaaataggattgatcagccccataaaaaagtattaataggccgggcacaagggctcaggcctgtaatcccagcgctttgggaggccgaggcaggtggatcaggtgaggtcaggaattcacaactagcctgggcaacacagtgaaaccccatctctactaaaatacaaaaaattatctgggccgtggcagcatgcgcctgtagtcccagctactcaggaagctgaggcaggagaatcgcttaaacccggaaggcagaggttgcagagagccgagattgcaccactgcactccagcctgggcgacagaccgagactccatctcaaaaaaaaaaagaaaaacaagtattaaaaagtactgtgggccggccacagtggctcacgcctataataccagcactttgggaggccaaggcgggaagatcacctgaggtcgggagttcaagaccagcctgaccaacatggaaaaaccctgtctctactgaaaatacaaaattagccgggcatggtggcgggcgcctgtaatcccagctacttgagaggctgaggcaggagaattgcttgaagccgggaggcggagattacagtgagccgagattgcaccactgtactccagcctgggcaacaaaagcgaaacttggtctcaaaaaaaaaaaaaaaaaaaaagtaccgtgtttgaagggaggaacagcgcctgtgttcccatgcagctcagcgctcacgcacatgtgcggtggtgatgcggggacttcagtcgagagcaagcggagcggcacccagtggacccgaggagtgagcattttgccccaaagccatgagttggctccccagactctcataaccagagagttacggaattttttttttttacctgggcaacgtctatataatttatcaggtctaatggcccttcaaggccttttccctcggagagtttcagtttctcaatggcaccaacatattttattcgaaattctgcacaggtatctgaattattgttgctttgtcctgaagatgaaagaaaagtggtaagacttaagaagaaatatctgcattacagagtatcctcagtcccttcccaaataaaaaccagactgtcattagaacataaccactaattacaaattttataatacacaatatttttatgtaatggggaagaacttaaaatttcactaaccttttcctcagtgactcatggtatactaaatatagtatacaaaggtctcaataataggaataaatatattaaccttcccttcaaaacaaacagtaaagaaaaggttactacataatgattacctttatgacgcatggtatttacttttggttctttctccctcttcaccattttttttccccttagagagagggtctcactacgttgcccaggctggtcttgaactcctgggctcaagcgatcctaccatcttggcctcccaaagtgctggaattacaggcatgagccactgtgcctggcctaccatgttagcttgctttcctcattcaggaagcctactcttcctctatcgttccatcagaaagaccacatagtttgtctttttaatgtcgatggaataatgccaggcagaaattctcttaacgtaacagcaacggttgaagagctgtgtgtgccgcaacatccagccaacacaaaaactcctacaaacgacttataacctcaaccatattaaggaaatactatatgattacttttaggttatgtaacaaaaagatgtccacaactttcataattttaaaggcatctggcaggaaagacaatggacctaatgctccaacattttctgttacagattcactaggacaggttcctgaagggagaaagaggaatttagacaagaaaatgaatatatttccagttagccgccagctacttagggagctaaggttagaaaccacctcttgatttctttttttttcttttttttgagatggagtcttattctgtcacccaggttggagtgcagtggtgcgattctcagctcactgcaacctctgcctctggtttcaagcaattctcctgcctcagcctcccaagtagctgggattacaagcatgcgccaccacgcccggctaattttttgtatttttagtagagatggggtttcaccatgttggccaggctagtctcaaactcctgacctcaggtgatccacctgccttggacccccgaagtgctgggattacagtcgtgagccaacgcacccagcctgtttctaagatctactaatttcgggcagctgcataaatatctacaagggtctgggacagatcctccccttaattacttgtgttggtggtggtcatgagctggtgaatctctgggttccttggagtaaatgaaaggctccttagccctttaatcaccaagatatttgccctattccccatagacaacataagtccaatggaattcatcttctgccaccccatttctttccattttatttttaatttttgtgggtacatagtaggtgtatgtatttattgccaccccatttcttaaaaaactattttgaaacttccattttgcccatgtgcctgtgccaatctccaaaggctatgtggtttcccccaatcacaccacaccctcagcccacgtcccgccaaatcttggtccacttctaaactcttgtcaaaagtggcaaaggagaggaagaaagccacaaatactgaagaactcattgtgctaccccagtaaaaccacgtgaacatcaatgaaaagcgcagacaatcaatgatccaacccttttatgtacctgagcttttggtggaatctgtgtcgaggctggccacagtgctggatcgtgaaagacccccaaggctagaatccacagactgagaaacagaaaaacaagtaaaaaacctccactgaagcagccctgtcttctctaaagtcctctaacccattcacatcatttattagagttgagctgacacatacaaaaccatgtcaattattcaggcatatcgactgtgcagatttttcttaagacaaattctgtaacaaacttcaaaaaaaaaaccacataatcccaactgttcgttcgtcccatgacataatatcggataaatgcggtggcaatattcttagtcgatttaaatcgaagccattaccgccacctccttacaagatgccttctatgaatattcttgcgaacatctctgccttgctttcacatgagttccactgaacccaaaacaaaccctgtgcagaaagccaggcaaggaccatgatccccgcttactaaatgaggaaggagactgagactttagtgacttatccaaggtcacatctagtaaatggctccaatctcaaacctaggtctctaattctaggtctctggtccagtgcttctgcaattattctgactagtgtctggcctgcagcaggaattcagaggctaactggcaggacagagcagactatcatgtgaactgccaccaaaaaaacaacaaaactgttgagcaaaatagaatcacatgtaaagggagttgttcctcagagctacactcccaatttctttagaaataatagtctctggccgggcacagtggctgacacctgtaatctcagtactttgggaggctgaggcgggtggatcacctgaggacaggagttcgaaaccagcctggccaacatggtgaaaccccgtctctacttaaaaaaaaaaatatggctgggtgtggtggctcacgcctgtaatcccagcactttgggaggctgacgtgggtggatcacctgaggtcaggagttcgagaccagcctggccaacatggtaaaaccccgtctctaccaaaaatacaaaaattagctgggcatggtggcgggcacttataatcctagctactcgggaggctgaggcaggagaatagcttgaacccaggaggtggaggttgcagtgagccaagatcacgccactgcactccagcctgggcaacaagagtgaaactccatctcaaaacaaacaaacaaaaacacacacacaaaaaaaaacacaacaatacaaaaattagccaggcttggtggcacatgcctgtagtcccagctatttggcaggctgaggcaggagaatcgcttgaacccacaggcagaggttgcagtaagccgagatcacaccactgcactccagcctgggcgacagagtgaggctccgtctccaaaaataaaaataaaacaagacattgggccacacagatgagatttccctgtagggtccccacgcttaaggctgaggaagtggcagtagggaggttctgtgttgagcagctccaggagttcaaaaacttccaagaacatggttcgtttccccattctaaggctgcacaggactcctacaatgtcagctttctgtgcttctggttacaaggccaccagctcagctgagataagccagcttaccctgccctgactggaaactgagtggcagtcgtgtgtctttgtctcattcacatgtggctgttatttaacagcgtggcacatgtggcacatgggaggcccggcaggcacccgggatgaaaggtctagggaggcatctcctgagggggccttgtgcgaccctgcgagacgcctccttctgtgctgtgcctcaccccggtcctgggactgagtgaacacacaactttaaaattagagcattcgcaagggtggaaaatcatgaaaaggctgttgagtcacggcatcccatcccatcccactcactcactcattgacccgactcagcctccagcttcctgcctgtgcctgggatgtctaacccccttcctcatttatgcctatttgacccgtatattttaaggtctcattcactacctgcttttttttgggaagacttctgtgatggttaattttatatatcaacttctctgggctaagtacccagatacttggtcaaatacaagtctagacattgccgtgaaggtgtttctttaaatgagattaacgtctacaccagcagacatggagtacagcagaggaccctccaccgtgtgggcgggcctcatccaagcaggtgaaggccttaaaggaaaatgactcaggctcccaaggagaagagtctgcctccagctgcctccaggctgcctttgggctcaagctgccactcccactcccactcccaggggtcttcagcccgccctgcagattgcagacttgcagcccccacagtcacatcagccaattcttcaaaataaaccttgaaaatacatcaaaatctctaggatataaacacatcctactggttctctggagaactccaactaatacgacttcctccacaactttaggcctacaacctccccagtctctgaatccctcaagcagtatctgtcattacctcacgcaccttcatgttttctgaattattcactgtctctgggtgtcaatcatgtctcaaatggtatctggcatccaggtagaaacacctggaatgaatcactttttctgcctcccacagcacctggtatgttaagggtttaagcttcgataactctcttttcctcatactccacaagccatcatcatcgatccatgggtcccatgagtgccacctcaaactctctgcagaacctgaggtttcagcgcttccttcacaccccgtccaagcccccatcatctctcaggttcttaccacatcctccccggcagtctctctgctcctgccctttccctgctcacagtggccaaagtgacccccaacaaaacttatataatattctgtcactccctggccccaggcgccccctgctttactctcagagtaaaagcccaggtcttcacaacacctgcacctgcctcgcccaggccacgctggtctccctgctgtcccccaaacacacaggctcactcctcccatgggcctttgctctctcctctccctaaactgcgatccttccagatcttatcatggccccacttctcctgtaggcccctgctcaaatgccaccaagaaaacaaggccttttctcgggaggaggggcagaaaaaaataaataagaccttttcttttcttttttttttgagacggaatcttgctctgtcacccaggctggagtccagtggtgtgatctcagctcactgcaaccttcgactcctggttcaagcaactctcctgtctcagcctcccaagtagctgggactacaggtgtgtgccaccacaccaggctaatttttgtatttttagcagagatggggtttcaccatgttggccaggttggtctcaaactcctgacctcaggtgatctgcctgccttggcctcccaaagtgctgggattacaggcatgagccaccgtgcccggcctgaaaataagaccttttctaccagactgttgaatactgcccctctcccaatctcccaccccctccattcctgtagtttcttccccccgtgttagtttccaccatctgaaactctatattttacttatttattcattattttctcccccaactgaaatggaagctctgaggccaggaatttcttccctctccctaactgctctattttatgccccttaaacagagtttggcacacagccatgctcaacaaatactcggtgaatgaatgagtgttcacgtgccattgtccaggaggtagaaataaaattgccattcttctaaacaccaacaaaattggtgtcaaaaacctagaacaaatataatgcagctatctttatactcttatattgaaaaattatctgtcagtcaaaatgaaatcactttattacttgagacaaaagttgccagttgaatagctcctcaacggtttgttttgcatgaattaaatccacgcttaccttccaacagcattcaaaaactctctggtatacagctatctgccaatctcactcttaagtaaaagtaattatgcacaccacaaaccctagaattcaagaggcccagccccttaatgcctgcaatttctatcatttaaaaattttttaaatcagtgcttatttcaacgaaaccattcataggtcatgtcccatctagtttaatggatttaagaatttcagaaaacctaccagaacagacaaaatgaagccaagcatagaatgcatctctagtgcaaaaagtaaatgttaaaacacactagtttgaagattatcaggagatctgcccacggtcagtatcctccatacaatatcagctagaagaaacaaaactctccctgctttatgattctgttccaaattccatttccctaccttgctcttagtactgatttcgctactttgggaactgctactactgtgtcgttttttgcccttgcgaaacatttttcaccaccattgcttgatccagagaagatcccctgaaaaaacaaatattggtaacagttacatcgggaaaagcaacttttttttttttttttttaagagacagagtcttgctcttacccaggctggagtgcagtggcacaaacatggctctgcagtcttgacctcacacctcagcctccccgagtagctgggactacaggcatgtgccactacacccagctaatttcattttttgtagagacaggatcttgccatgttggccaggctggtctcaaactcctgctctcaggcgatcctcccgccttggcctcccaaagtgctgggattacagctgtgagccaccatgcccagccaggaaaagcaactttgatattggttacagttacatcaggaaatgcaacattaaatcactttatgcaaaatagaaataaaaatcatcaattaacttttcccttggatactattccttttcattctttcctattaaattatagaaagttaacccaataagcaaaaaaggcagaaaccttcttgtcctacaggtgtgaaaagcacttttctcaaaattttcagacacgtcacctagttctcaaaattttaagggccttacttctcttcaattgagtcaagattttagcaaaatatactatgacacattggcttttcagtcgagatactaagattcagtaaccctctcagtttcacattctatacttggtagggctaagatatacacacctctcagaaatgtgcatttttcttgaagttttgaaatacctttaagtaaaagctgacacaaagacattcccaggtgccagcacctcacctcccctctctattaagcgtagttaaggagatgaccttgcctcccagagtctgtgttacatatttctttttttgaaattaataataataaatgcattggaaactaagattcatccttgccagttgcataaggacagcatatactatacttggcaaattaactaacctacatgaagctgcacagctcacagaactcccgggacagttctactgtcatagcctcatgataaccttgtgacatatccatttgctctactgatgctttttaagggcataccatatgccacacactctgcagggctctaagctctccctcaaggggctcacagaaggtgggctgtaatctgccttttacagatgagggaactgtgacctgcctctcaagacgatttatgaataagataacctgatcaattttttaccaaaaactgtattctccagagagaacaagaaaatctgcttactatagaattgaacactatttgactgtcttcaaaggtcccacatacagcggtctgcacagagagtttcctttcattctgacctgggtgatgcttttcagagaaactacgcacctgatgaaggaaaaagaacgagcaactcacgcagcagtcagtgaaagctcctgctgcaacccaaagattctccgtatttggagaccccactctaagtccacttactaggggacgacattaggccacttgcccaagtctgaccactgagcccaagctttttaatcagcctcatcatccaatttacttctatatttttgctttatttgtggggtaccaggaaaatctgatttattcattcattcctggatagtcagtgagcacctaccaggtgtcggggatgcatcagtgaaccaaacagagcccctgacctcagggagcctgttcttagcgagagtagacagaccaacaagaaaaacacacatgaaacatattattaggaaaccactgctatgaggaaaactaacacaagttgaggagacacagactaatggaaggaaggggtgggtatttcagaaaaagatgctgtagctctttttctgaaagaagtgcgggcagccataaatagcctggaggcaatgccgtgcgggtggagaggggcccgagggaacagtcaaggctgtccgggagcaggaggacagcaatgggcccaaagtgccacagaaggccaggcaggccgcggtaacagtggactttagtttaagaggaatactctgaaggctttttatttattttttgcttatctgctgtgatcttctggaatggaggcttttaaaaagcagtttagcgacacaatcaggtgtcttctgttttttaaacgatgaccctggctgccagatagcgaactaactccactggataagggtaaaaagtgagagatgtgttggaagaagactgcgggtgattgctgcaaaggggaaccttaccagcacaggacacttgtcagtgagagatggcaggagagccttattccaaggcctgcacgaaactaggttaacgtagcagcataaagtgccatgttaatggcgctcacgggttaaaatgttgatgtgtaacatatttaaacatcagatacttaagtatatataaatacatatttatatataggtaacaattttaaatatgatttgaattttaaatcaaaacttattttaaaaacaaaatgtgattctactgtcagtggaatcctgaagtgtctcctcaaatcccttgatatgaaaatcatgacacgacaatgccttagcaactccttaaggctttcttttcatcatcaacccagcggcttaggaaaaagcagcatttattaaagtctttgatatctgctgcaattttgatgcatgttctcaagcaaatcattcttgcctcaaaattattcatgggtggctcacgcctgtaatcccagcactttgggaggccaagtcgggcggatcacgaggtcaggagatcgagaccatcctggctaacatggtgaaaccccgtctctactaaaaatacaaaaaattggctgtgcgtggtggtgggcgcctgtagtcccagctactcaggagcctgaggcaggagaatggcgtgaacccgggaggcggagcttgcagtgagccgagatcgcgccactgcactccagcctggacgaaagagcgagactccgtctcaaaaaaaaaaaaaaaaaattattcatgcatcaaaatgaggccaatgatcctgattggcgattggatgctccgcaggctcatcaaatgcaaagatgtctcaagctgaacccatcatcctcccctccagatctgctcctctcctctcctctccctgtcaggagattctattattgctggaggaagccagaaaatcatgatttccttgctgtccttcaggccccacatccaatctggcaccaagacccactgtataccccacctgaagagctctctgagccagctctccaccagggcccccgtcatcctaaaccatgggcacagacactatttttttagaaactgatgaatgtgatggatcctcaccctataaaaatgcacatccatacaaagtttggcatgaatttaaggaattcacaaacccaaggatatttcgtggataagggaccttgtcctactggattccctaacactttaaatctacccccacactgcagccaaaacgattaaaatgatttctttcaaacatgaatctaatgccactagcctgctgaaaatctttcactggttctccaaagtcagagaccaaagtcaacgttcttcagcacgacacgccaggtcctccaggacccagctcctaatcacctttccacttccatcctccacaacccgggcacagttcattgatctcagcaaggcaaagctgctcctggttctcagcgcgatgctccacgcgcccctgctttgcaccgcccgggacgtccttcacctgtcaggcacttggctacttcttacctttcaaggcccgtttcaggctgcaggccttcctgggatctcaaggctggggtaagggacccacagcttgagtgtaccccctgatcacagcgccacgatctgctgtggtctctgatctcactctcccagctgcacgctggtcaaaggcggagctcggtgactcctctgcattgccagggcgcctggcaggggacgcgcttactgaagccgagaactttctggggaggtgacaccccaacagcgattcccatgtaccaaacgcctaccacgtgccatgcacggtgctaggtgcacagatccctctcaccctcaccctcaccgaccagcaaggctgcaggataacagcccctttcaaacgaggatgccaaagcgcccgaagagtcagtgacctgcccagggtcaccagagtaaggacggatgcggccaagctcggggcctagggagagccggctccgaagttcctcccagacgccagcctgcttggcacctgtctgtcaccgtgatggagcaccttccaagcgctgggtgcggaggatgtgacagcgaaggggacagacaaccccgaccctgagaggcgggaggcggccgaagcggggcagaggaagaggcaaggaaacggcccgcggccgcccgccttgccgcccctccggggcgacagcggctcgggaagctgcagtccgcaagcccacgcccgatctgcgtggttccaagctcctccacccgcgccccgggagcgcggccccgcccggaaccaagcccgagcccaggcatccctcctccgcccgccccgcggccccacccatccttcctggccgtccgcgccgctctcgggaccgtgttcccgtcaggcctccgcgagctcggccccaagcgggacgagggctgggcgctcacctcgcagccgcgggcccatccccgggttgcggacttcggggtccgcgtgggagtgccgcggcctttggcgcccaggcagctactcccgttcccgctccagcgccggcttttccagccctcctgcccacgtccgccgggccgcgcctccaagactatgcgcaggcgcagtcctgacgtcctacccccggttccaagaccccaagtggtgggaagcctcgcgagcggcgtcccccgaccggaagtcgaggggaggagtctagtgccgcgggctccggagtgacggaagttgtgctcttggtgaatggggttcttccttttttatttaccggtggctgtgcttccaatttaggaagaccccggcgacctgttcctcacccccgcttcgccctcacactttcgggatgtctgcgattcctgctgaggagagcgaccagctgctgatccgacccctgtaagggaccagcgagagagggaatgaagccacgggctgtgaggggcgcgaggggtaaccggagactggcctcctccgtcgcccgcgctcccacctaccccggcagcctgcctttggtccgcgcttgcgggccaggcttctcaggctcgaggggttggaggaccgttgatcggaaggggcctgctatagagtgaacgggattttgctttttcatcagtttcaggggagggtatgttggagtcggaaaaaaaaaagttttacggggccaccgctcgctttcgtacacgctaagaagcgttttcacttagcacaagcacggatctctgcgcgtcagggcaagctgtgagggagccggtgaagcttatgaccgacaggatgagaggaggacctgaatgaggctacagccgtgcagggaagaattaagtctgtttcttaacaccagggcttcacatgtgccagaagttagaaaatattagggacttgccgtgagtttcgatcttctcagctcaggccctagtagaataaggaaggtgtaaagctggagaagagaaagtgcagaggtgttagggacaaaaactcagccctcgactgtccataaggagagtggcctttcagtggacacgatcctcatcagtcgggaatgctgctgaaggggagatgcaaatgtagagaacttgaattcctacagatgagcatttcgaacccacaacatgtttattgttagatactagttggcacaacatgaatatacgctttccaaaaggtagaaagtatctcctttacacaatcattcagtaaggcttcattgagcacctgcttgggacatagtccgtttccttctgcttagttcacacctgtcatgtcttcctgtgatgagcaaacactgagcaagtgtcaagcaccacacatggggatatagacgcaacagagggcccagttaattgctctcgctcttttggagagaattacagtgcacagtgggaaatattggagagatactttggaataataggagactattactttgaagtcagacctgaagtccattatctacttgaccaattagtaggacaacaatctcactgaacccgttttctcatatggaaataagataaaacttgaagagtgaacatcgcggtaggtgctttgtaaataatagctaatctaagaacgcaggcaggcattgcactgagcactgtgaaagtatggaaaagggatttctgacagattgaggaaaaaaggatacctcgtggatcctgaaaaatgtgatgcctgagctgagtcctaaagaatgagtaggagttaaagactggggggcccaggatgttctaggcagtggaagtggcacatatgaaagtgagagtggtcacagcttgtggccagattcctcatggctgtagctaaagagttgagttagcagatgaagcgacaggcagttgaggtccagtttaggaagcacctcgtatacacaggagtttggacctttatcaagtcaattacagggagccagcgaaggctattaagcaagcatggatattgtgggaattatgttttaggaaaatctctcctggcagcagtgtagcagatgaataaaagcatggatgaataaaagcatggattgagtagagcagattcagtgagatattgaaagattctaagtctagctgacgagagcctgtagtgagtgatgtgagtgtgagagagtatgcaaatgagatcttcaggattttgtggctgatcagctgtatctggaagggtggttgtggggagggaaggcagggcagagaggatgttatgatcagattcctaagtttggcagttgggaaagggtagtgttattcactcaaggagtataagagatggggcaactctggagtaaatttgggaatttggttgtttcgtaacagctttattgagatacagtttacataccatacaactcacaatttacataccatacaactcatttaaagagtataattcagtcgttcttaacatagagttatacaaccatcacctctctctaattccagcacattttcatcactcccaagagataccttgtattcattagcagtcatagacaatccccactacctctccagccctaagcaaccactaatctacttctttatagatttgcctgttctggacatttcatgtaagtgtgatcatacaatacatactcttttgtctctggcatctttcatttagcataatctttccaaggttcaaaattgaggagttttgttcattcaataagtattttttgtgatgtgctacatgccaggtactgtagcaatacagcagtgaataagatggacaatgcctctgttcttaggaagctttcatttagtagcctgaaagaagacataagtaggtacaataacttcatgtagttgtattaagataactgatgctgggttgtggcttgctgtgaagggcaaattagaggaggtagtcaagggaaagcatctgagaaggtgacgttggaactgagacccaaatgatacaaaggagccaaccacatcaatatctgaagacaaagcatttcaggaagaaagtagagcaagtacggggcatgtggtggaaactagtttggcatcttgaatatgaagtcccgggagagatcctagtagagatacctagtgtcacgtgtatgtattaaaggtctagaattcagaagaacaatctgggttacaaatacaggcttggaagtccttagcatgtcagaaagatgagaatgaagattgagaagttggccaaggagcaaaccctcggaatatcaacatttaaagggtaggcagaggtggctgaatatgtgaaggaaacaggaaagccagcaagacaagatgagagcatcaggtcagagaagccaagggagaggtgcttgaggaaggagcaggtactccttaggagtgacaacggctgccaagagaacaagatagggactgacacctatagttccagctacttgggaggctgaggcgggaggatcacttgagcccaggagttgaaggccagactgggcaacatagggggaccttgtctcaaaaaaaaaaaaaagactgaaatgactactgagcagcaaggacagtttcagaaaagtgattggtaaaagccagagtatagcgaattgaggagcgagtagaaggtgaggaagtacaagagggtccactgccctgggaggtggtctggggaaagaataaagtgggaactaaaggagcttagagtcaagggattttaatttggggatgaacatggctgtagtatgtttaaatttggattggatggtaaagagcagacagtgaggaaaatgtcaatgacacagcagtgttgagttcctcagaaggagggagggagtacgtagagtagaatggtggaaagtttcattgtggaaagagaggtctattctatctatagaggagaaatagaaggagacagatgtgggcaggttggtaccctgttggtacatgtattcttaattattgtaccaacatgaagttgaggaaatttacaaatggactgtttatttttttgatgcagaagatggcccatgcctcaagtgaagaagaggatagaaggttggaaaatttgggaaagggaagaaagtttgaaaatagttgatatggaaatgaaatggagaaaacagccaggcaacattgagggccagttaaagtggaaggccagggtatccacaataattacaaataaaaaatgtttaaaaagtggaaggccaggaatttatggcggctctcatccacagttgtttgatcttctgtatcaacacctgtttggaggtaggatctcagtttggggatagatccattgcatgtccatctgactgagttccttgaggtcagggtccctgtaaggcatttccatgtcctaggcacttaatccagtgcttggcaaatagaagctgcttaatgttgagtgagtgagtggattgtgagctagaatggttgggaaaaggcatcaaagaaggtgagggatttgaaagatgaggtttaacttaaagtgtgccttgtgaccattgcaaattatggctgaaattattaagaagaaacaaaaattatgtaagtagttggtataaaatatgctgaaataacagaaagtagaagaaaaagtgattgaaattcacagtatgaataagtattttaaaaaaaaaaattttttttttttttttttgaggcagagtctcgctctgttgcccaggctggagcgcagtggcgcgatctcagctcactgcaagctccgcctcctgggttcacaccattctcctgcctcagcctcccgagtagctgggactacaggtgtccgccaccacgcctggctaattttttgtatttttagtagagacggggtttcaccgtgttagccaggatgggtctcgatatcctgatctcgtgatctgcctgcctcggcctcccaaagtgctgggattacaggcgtgagccaccgcacccggccatttaaatttaagccatttggcaaatacacattatgatcttaaagaagatgacagtgttgaaatgcttatggctttctacttaagtgctaattctagaagtattattatataatctgcgtaactgctagtttacattttaaatacattataatttaatcctaaaattcagaaaattgaatttaaatcaagcccaaacctttgggcttcttggatctgtaccgccttctctcttaattttaagaactgcaagatccctggactcccaaggatcagttttcatctgttctcatgtggacactgttcttccctgtctttgtgattttgtagaactctcttacgtctcagaatttttcagtgaggtgctgtcatcagatggcatgtagtgtacattgtaaaaaagtgtaagtttattggacttggttttgattttttttaatccttctttttctccccttgaatatttacagtggagctgggcaagaagtaggaagatcatgtattattctcgagttcaaaggaagaaaaataatggtaattactatttttgtactcagtttaatagtatggctctgtctgtattgggtgttagtcttttctcatagactagttatctttttagctcccagaaaaatgttatagtacatgtaatctatgctgtatagtgttaatgagaaaaactaatacacacttctacttagtaatttagttgattaagaagatatattctatgactgtaaaattgtcagctagatctgttgaactgttacctcttcaaagtccctcttccactcctgaagggttgagccagcctaactgccccacccccagtggaagatcccaagggcccaagcactctgaacacactgagagctctagccgcctccagcatgtggggatcaagccttggcctagaagcttggatccccaggtcccactggggctgccggccttggccaagtcactttgcttctctaagcctgaaaggtagaggggttagaggagatagtttctaaggtactcattagaaagtcagttctgtgtctcagattcctttgattcctctttcttctcaactcctcccaatctgaaaagaacatgtataggtcagacatagtcatccttttagtcatctgttttgttaatttggtagtaacgccataaaaataagtaactttaatgactgagtcttaagaatttgttccctaatgccttaaaatatttaaattaccctgatcaggtaagtttcccatttctaattattatcttctcacgagagtcgatctggtagtagtaaatctataaacttttaaaattttaatctgatatcaaagtttttgaaaaagatttaattcgttgttagaatgacgaccaaaagtagctggaaagaagctgttttgtactttgcatcctgtgacccctaaatgtgagctatattttaaatttgttgggaagttagaattgttaatggcatatttgccacatttaataagaatcatgttccaagtgctagtgcctggagtccatcttgagtatatgggtgatggaactagaattattgcctatttgccgaatgaattttaataaaatgtgcaggagattgtgatctcttttcctgtttctttcagctcgactgtgggatccaccctggcctagaaggaatggatgctcttccttatattgatttaattgacccagctgagattgatctcctattaattagtcagtaagtttttccctttattaatgacactttttcacggacttttactatcaagatcattctttactagattttgagagtttggttttttaaaagagtgttttctgctaggaagcatattgcagacatctgagtctaaaccaacactccgtaatgtcatcacaggctagagaagtttgctatgaaaaacttacctacctctatgtataagttcagtgagtatgtgagaaggagatagtacagaacttgaatcattgtaaaacttgagactaagaaagcccttttccaggatatctccttgaggtcactgttttatcacattcttctataagaacgccatttcacctttattgaaactatttttaaatagagttcatatagaaaaatgtgacaagacagtgacctcagggagatatccatgtttcaactttattctgttaaaatgtttgctgtaattctggctgccaggagtaggcttgggatattcttcttcctccctaattcactaataaagttttttgctgtttaaaaacaatactttaaacatctttcctccattttagaactgtatgcattacttcttccttctacacatacctactcttggtttttctgaaagtatcagcacatagttgtttatataaaacttgttttgtacagtaagcaacagtttcattacatggtatctgatggataataattttaagaattaatgcagcctctttctttttaagtttccatttggatcactgtggagctctgccctggtttctacagaagacaagtttcaaaggaagaacatttatgactcatgccacaaaagctatttatagatggcttctttctgattatgtcaaagttaggtaaattactttattagattatacacgactttggctctatatggcatgtatggttcaagatatggaccattttgtgttttaaaatgaggtgctcccttttcatgtataaggatatcagtaatttcatcattcattaacaaggtcattgaaacctattgtgtttctagcaccttcctgaccttgaaggtttttttgagacaggatcttgctctgtcatccaggctggagtgcagtggtgtgatcacagctcactgcagcctcagccacctgggctcaagcagtccttccacctcagcctcctgagcagctgagactacaggtgtgtgccaccacacccagcagagttttttgttttttgaagagatagggtcttatgttgcccaggctagtctcaaactcctgggctccagtgatcctcctgccttggcctcccagagtgctgggattacaggcatgagccactggcctggccttgaagtctttatatagctttttgtgtccttttaaaacttcattaggctggattggaagagttatgcttaattgtggtaacactcgttaacacttcaataatgcttaccacatactaggcccaatcctaaattcctaatgtatattaacttcacacaaagataaataaatatacatattttttttttctttttttttttcttttttttttgagacggagtcttgtgctgttgaccaggctggagtgcagtggcgctatcttagctcactgcaacctctgctcccgggttcaggcaattctcatgtctcagcctccccagtagctaggattacaggcacacagtgcataccaccacgcctggctaatttttgtatttttagtagagacggggttttaccatgttggccagcctggtcttgaactcctgacctcaggtgatctgtctgtcttggcctcccagagtgctgggattacagggttgagccaccgcacccagccgggagataaatatatttaatcttcacaccaactcatgatgtaggttctattataaattccattttatagatgatgaaactgaggcacagcgaggttaggttatttgcctaaaatcgtcacagtaagagacagagcaaggatttgaacccaaacaatctggctccagagtcagcgtccttaaccactgttctctcttgcttttttgtaagtacattaacataattttcaggagaaaggttgtgctagactttgtagaaaaatcttttctcatcctaatgtgagaaatatctgccatggttcaatgtatgtgagtgtgttatatctttcaggagtgttggggtgggaaaaaagtttgagaagtactatcctaaagagtattttgtcttaatttattgtatgtattattgaaaattgagagtactttgagctcagtgtcttaatttcctgtgtggtttgtttaaaatcaagttttgtagctatacacacaatagagtaaaaaaaaaatacacaaaatatctgagaaattttaaatacatgattcatacagtatattttaaagaaatatcttcatggagatgttatccacaatttctttgtgttcaaaggctttttaaaaaatctgactcttaattgtttttgctggcatctttcaaaatttagtaacatatcagcagacgacatgctgtataccgagacagatttggaagaaagcatggacaaaattgaaactatcaactttcatgaagttaaggaagttgcgggaatcaagttttggtgttaccatgcaggtcacgtcctaggagccgccatgttcatgattgagatcgcaggcgtgaaggtaccctctggctgtggcgcttttctccccagagaaatcagtacagagctttgtgccaccaagtactattaaaaaaaaaaattccctaagacttgcaaagtgtcagaacacggaaacataagataaaaatacagttaacgcttgttccttttaaatattgcagttcctacctccattacaatactttctttatcaagactgaggaaaaaaaaatttttaaagactgagaaaagagtaaaataaacatctcaaaaagtgattccctgacaccataggattccgtttgctttagaaaactggttagggaagaggtgtctttgtggctgcattcgtttaaaattaaaacacaatttgatattcatgtccccctgatgtcttagaattcacaggtaagcccctaagcagggtggactgcaagagtgaaaggggttaattaggaaagatctttggggaagccttgaacttctgacaacgtgggtgggccgctggctttccagactccagagcagccgctctgaactcaggctgcaaataagactcacttagggagctgctgaaaataactgttgaatcaaaatctggaggcgcagcttggccttttccttttcgagtttgctaggtgattctaacgtcagccagagaaccaatgctctagtgtcacgtcctaaatttttcacagctgcttatacatttggaacttttagacattgaattgtaaagtatatcactaaatcacttattcttgcagtttgctccagggcacaaaaaataagtagcacaaatgcagatgtgaattctcttggaatttgatgcagaccctcttatgattttatctccggttttagaccatgtacctcagtgcactcctttccttgtctgcatgccctttttctctaagaagttcagagcacttctcaagtggattaatgttatataggttatcattgtgagatgatactgggaatagattattcccatttactagaggaaataattgaagcactgaaccgtttactgactgaactacacattttgaattggacacaagcactgcatgtaaatttcatcagttttagacttaaaaactgtaactgcacttttggatttcatgagtttaatctattcactagcaaaatgaagccttccccaaatcctaactttctagttttatctttttcacagcttttgtacactggtgatttctcaagacaagaagataggcacttaatggcagctgaaattcctaatattaagcctgatattcttatcattgtaagtattaatatactatattgtaatcaatgtaatgtaagcagattttttttcttttggaaaataatactgtgatctcactttcataatatgttattggatataaacttaccttttttaaaatataagaaaactggtggccgggcacggtggctcacacctgtaatcctagcgctttgggaggctgaggtgggcagatcacttaaggccaggagttagagaccaccttggccaacacagtgaaaacccatctctactaaaaaaatacaaaaattagctgggtgtggtggtgcagttacctgggaggctgaggcacaagaatcacttgaacccagaaggtggaggttgcagtgagccaagatcacgctgctgcactcgagcctgggctacaaagcaagactcagtctcaaaaaaaaaaaaaattggggcaggtgcttctttttgtagtgcagtttcactttcttgctgttaaatgcattaactctagtctaatatcagagatgccaggctgcctctgggcaggatcagcaggctgtctctgggcaggatcatttttactggctatgccctctctctgtcttctaaatatatatttctagatgagaatatgtagaagaacatcttacgggtcattttaaaatggtgtgacctcactgcctttgccatggtgactatcctcaggcccttagtccatgctaacttatcgttttgtttatctttgtgtgtcatgtctgcctactaggttgcaagtcccaggggagcaaaaaaaatgaactgtgtacagaagctctttgggggcagcttgggatgtgtgttgctgactgtagagtcaggggttgggagagaaatcttgcaagcttttggtgtatataagaacatcaggtgtatgtggttcaaggaggaagagttgtctgtttctcctccaccacctaccatgttccccagctgcccaggcatgtgggccagtacatactgctgtccataagcaacatgtgagcagattagattggactctgctcatggtatgcccagcatataaacttaatttaagggaagatttattttttgaaccctcagaaaaagtagctattttcatagtaccatactttagagcagtgcttcaaattttaatatgcttataatcatctgatgatattgctaagatacaaattctgattcagtacatctgggctggggtctgagattttgcgcttctgataagctcccaagggatgtcaatcttctggtcagtggaccatacctagtaagactttaaggatattcttaaacagaagtataagaaacaacatctgtttctattttaaaagctttgacttatcagaggtgggagaaataacctttttcttcctaatggaaagcaaaatggttaaaaaaggacatgggaagaagatacagttttggactatttcattttataaaaagttcttagatttgaattctagcattctttttttttttttttgagatggagtctcactctggagtgagcgactgcaatggcatgatctcggctcactgcaaccactgcctcccaggttcaagtgattctcctgcctcagcctcctgactagctgggattataaggcatgcgccaccatgcccagctaatttttgtatttttagtagagacggggtttcatcctgttggtcagactggactcctgacctcaggtgatccacccgcctcggccttccaaaatgctgggattacaggcatgagccaccatgcccggcctctttttgttgttgttgttaaattttatttttttgagatggagtcttgctctgtcgcccaggctggagtgcaatggtgcgatctcggctcactgcaacctcctcctcctgggttcaaacagctctcctgcctcagcctccggagtagctgggattacaggcgcccaccaccacgcccagcttatttttgtatttttagtagagacagggtttcaccatgttggccaggctggtctcaaactgctgacctcaggtgatccacccaccttggcttcccaaagtgctgggattacaggtgtgagccaccacgctgggcctgaattctagcattcttgcttgctcttcccaattactattatgacaacacatgttcgagtaaatgacatgctaatggagaagtgaattgcttagcccctcagtatttcattgatgtttaacttttgaattcttggaggatcattggtcttagtctcacacttctaatgtattatttaggaatctacttatgggacccatatccatgagaaacgtgaagagcgagaagcaagattctgtaacactgtccacgatattgtaaacagaggaggcaggggtctcattcctgtctttgctcttggaagggctcaggagctgctcttgattctaggtatgccatttcctttgtatttaggcgatgatcaaaatcttgtcattttatcaagataataatgtggtcttggatgagtcattccaccgttctggacttcagttttcttcatttaaaaatagagatttggggccgggcgcggtggctcacgcctgtaatcccagcactttgggaggctgaggtggggagatcacgagatcaggagttcaagaccagcctgaccaagatggtgaaaccccatctctactaaaaatacaaaaattagccgggcacagtgacagatgcctgtaatcccagctactcaggaggctgaggcagagaattgcttgaacctgggaggtggaggttgtagtgagccgagattgcgccactgcactccagcctgggcgacagagcgagactccatctcaaaaaataataataataataataatagggatttggatctaggaatagcccaggaaaacagcaactctcatgcactgctgttgggaatgtgaactggcgaccccttccggttgccatcagaagtcttaaaatatgtgtaccctttggccagcagttccgcttctgggaaataaatgagatgtacagaaaattttgtcaggaaaggtattcatcattttagtattttcaaagaaatatgtgagtaaatatagcattgtaggaaaaaattgtgttacagatgagtaattacatactttgcacataatatattaagtcaaccaaaaaagtagagttcaaaactatatttactctgggctggacgtggtggctcacgcctgtaatcctagcacttagggaggctgaggtgggcagatcacttgaggccaggagttcaagaccagcctggccatcatggtgaaacctcgtctctaccaaaaatagaaaaatgagccaggtgtggtggcacacacctgtagttccagcttttctggaggctggggcatgagaattgcttgagcctgggaggcagaggttgcagtgagccgagattgcaccactgcactccagcctcggtgacagagggagactgtctcaaaacaaacaaacaaacaacaacaaaaaaaaaactatatgtactctgatcctagttaggtaaaaaatgcacacacaaatgactgaaaagctactaaatctggatagtgaggatatggatgatattttttgttttctgcttttctccattttacaagtacttcagtgagcatgtataattttttgtaataagagaaacaatggttgttactttttagcatacatttgtacttcatgatcccttctacctcacattcggtgattctagttgggaagagcactcttattgaagaataaaagaaggtactttacagccaggcatagtggctcacgactgtaatccctaattccagcaccttgagaggctaagggcggaagatcacttgagcccaggaatttaagatcagcctgggcaacaaggcaagaccctgtctctacaaaaaatacaaagaattagctggacgtggtgatacacgcctgttgtcccagctacctgggagactgaggtaggagtatcacttgagcctgggaggtagaggttgcagtgagccaagattgtgccactgcactccagggtgggcgacacaatgagaccctgtctcaaaaaaaagcaaataataaaatgggtgctttgcatgagtgtcacctctgtgcgaagcactagaaacacttgcatcttagctcatcctctctgttctgccatcttggtgaggaggagaaaaaatagtatccctgtcacactgaaaaggaaaacagaaggaaagttggaagaaatgaccccagatgaaaaggaaatctgtaatagataggacttctagaagctgaatttcccaaatccgaatctaattcagtcttttgatcttgattggtcctccttcctaactgcaagtcaaattcgtccttagaagtcttgaaatcaaagtcttcgtaacctgtaagatgaagaacagagaagttaggaagttgaaacaatgttgccaccatcaaattgggttgccagatttagcaaataaaactagaggacaactcattaaattttaggttcagataaataatgaataatgttttagtataagtgtaccaaatatttaatatatattctttttttttttttttttttgagacagtctcaccctgtcacccaggctggagtgtggtggcgctatctcggcttggcgcgatctcggctcaccacaacgtctgcctcccgggttcaagctattctcctgcctcagcctcctgagtagctgggatcctagctaatttttgtatttttagtagagacgaggtttcaccacattggccaggctggtctcgttagtatatattcttatactaaaaatcttttgttgttcacctaaaattcaaatttaactgagtatttgatatttttatctggcaattctaccgtctgttctttgcaactggttgccctttttccttcaattctcccttgtaatgtagtataatagaaagaacagctgctttcaaatcttatctgtgtttcagatgaaatctatcatatggctagagccatatgaccttgggcaaattatttaactttttttaatattcagagtttattcataaaaacacgcacaacaaaccaagaaatggtggcatgattgtgggatgtagtccgctttagggtatctaagaaatcataagagtaataaatcatgaatgggataaactagaagacaaagcaggaaatttgtaatgcatgtgacagaaagtctttgtcctcatataaaattatcattgatacatcaaatggaagaataacattcacacaataatcagcctttttttttacccttagtttgctagttaaaatggtgataagtcttcgtaagttgttttgaaaattagaaattatagatgtaaattggtgaaaccccgtctgtactaaaaatacaaaaaattagccaggcatggtggccagcgcctgtagtcccagctactctggaggttgaggcaggagaatggcatgaacccgggaggcggaacttgcagtgagcggagatcgcgccactgcactgcagcctgggcgacagagtgagactccatctcaaaaaaaaaaaaaaaagaaattacagatgtaaattatataataggcatataatacattttcaaactgcagaggcacctattagaataaagggtgtctttcagccatactaccctgataaaattttgggatttaatgagggcttttcccttaacataagtcttttgacggtatattacccactgctttctttaattatcagaaactggttagtaggtttttaaaaatacaagcatggctgagtgtggtgactcatgcctgtaatcccagcactttgggaagctgggcaggaggatcacttaagtccagagtttgagaccagcctgggaaacataatgagacccagtctcaaaaaaaaaaaattagccaagtatggtagcacactcctgtagtcacagctcagaaggctgaggtggaaggatcacttgaacctgagaggttgaggctgccatgagccatgatcataccactaccctcaaggctagtcgacagcctgggtgtaaaacacaaacaaaaacaaacaataatagcataatatgactatactttttttttaagtgttcaaaatcggttaactcttggcaattctcttttgtaattagcactcaataaatctgtttgaaatattaataatacatttttaaaaccatcacagaattttttctagtacacttttctaatacatttaaataaaaatgtattatttagtgtcttattatggtagtaagttatagacttcagtgtaaacttatactgagtcatgtttaaaagcctccacatctttggactatgatcatagcattctttttaggtcatgcactatttagaaataagttttggttttgtaaatttaagttagttacaaccaggataattttgcttaaactctttaaaatatagttgtgtgctttatttcttggttgtatgtgtatcatttcttgttctgtgtgtatcatttgttatttgaactgtttaccccatctaacaaagtgatgtttgtttcttgcaaaatctctctagatgagtactggcagaatcacccagaactacatgacattccaatatactatgcatcatctttggccaagaagtgtatggcagtgtaccagacatatgtaaatgccatgaatgacaaaatccgcaaacagatcaacatcaataatccctttgttttcaaacacattagtaacctcaaggtgagtgcttgtggaagaaagacaaggatggataaaaccaaatcagtcattagtagtaggaggtacgaggccgtgagtgatggctcacagctgtaatttagcactttgggagtctaaggcaggaggatcactagaactcaggagtttgagaccggcctgggcaagatagtgagaccctgtctctatcaaaataaaataaaaatcgtaggcagtgcttgtcagtgactctggctgaattcctcttgctggagtcttaccgcttctcaacaggtgtcgtttttctgcagaaaatcaaaacttcagcagctgacattctttttctgcttcaacagattttgccacttgccccaagtagccatgtgttctcagtatttataatactcatctcttttgccgtaggcataaaaagttctgaggagaaaaatattttgtattatgtatttaagtttctcttctcactcaaaccaaatcatctttttgattagtgctgcaaattctatatatgaaaatttttatatacttttctggaagcattcaataaaatctgattttatttaatttaaaaaatactgtttaactcgatgcttgaatcataataaaataattgatatccgaaataatttaaaagtggacttccagttgtaaataggctttgttcataaagtatttattttaagttaactgcttaaggattgtagacaagttctccctagaacaatgttaaaccttttgatttccaggccagctcaaaacatgcatggagcatgcaaagctattgtgagtctttgggaatattttttcagagttgtgtcttgggtagatcaagacccatttgactcttccttttacttttctgcctgcctgctaggcgctgaagatggtcctgatggttctgatggccctctagctaccaacagaaggttttgaagatcggggtgaacttaccgctttttattacttggtttttctaccattcctagcctaaactgtttaggaatttggcaactgaacttaaaatgtttacagatcttgtgaaggctctttcagtgatgtgattaatctcttagccttttgttattctttaaaaagaaagaatgctttgtcagctgctggtagctaacatacttttcccattctgttttctctcttagagcatggatcattttgatgacattggtcccagtgttgtaatggcctccccaggcatgatgcaaagtggcttatccagagaattatttgaaagctggtgtactgataagaggaatggtgtcattatagcgggatactgtgtagaagggacacttgccaaggtcagttacagtcataggctgttgtgttattcctattcagaatcacggaggtggcacggtcctcacaggtttttgcactgaagtagttcttcaaataatacaagttttgatttttaaaaatgaggacgggaataggtagctagagatgtgcgtaggatgtagaattatgcagacactgaatggcataatgaggtcccaggtgattgatatacacattaaagtttgagaaatgctcatctggttgcaagtagagaagaatggacaggaacctgtttgagacaaacacgtgaatactctccgtcctctcatgaagaagaggttgactaatacatatgatcttaaaaagctgtagaatgtgtttgggttgaccactttctactattatgaaacattgattttcagctcttagggatgtagaaattgtagaaaatatatgcagaacttgggaggcagtttctgagcatccaggcatcacattctcatcctctattttatttttaaaaatatgatatgattctttgataatctttattactttaccttattctataaagttctttagtgacaatgttgtatttaaaatagatttccaggctgggtgcagtggctcacacctgtaatcccagtactttgggaggccaaggcgggcggatcacctgaggtcaggagttcgagaccagcctggccaacatggcgaaaccccgtctctactaaaaatacaaaaaattagctgggcgtggtggcgtatgcctgtaatcccagctactcgggaggctgaggcagggagaattgcttgaaactggaggcggaggttgcagtcagccgagattggcgccactgcactccaatctgggtgacggagcaagactccatctccaaaaaaaaaagaaaaaaaaaatttccaggcctggcacagtgcctcacatctgtaatcctagcacttcaggaggccacagcaggtggatcacttgagctcaggagttggggaccagcttgggcaacatggagaaatcccatctctacaaaaaatacaaaaattagccaggtgtggtggcacgtgcctgtagtcctagctagttgggggactgaggcaggaggcttgcttgaacccaggaggtcgaggctgcagtgagctgagatcgcacactgcatttcagcctgggtgacaaagtgagaccctatttgaaaaaacaaagattttcagaatagaaatatatccacatatctaggaaatgactttggagagcacaagaatagttgggaatacaggtttgtctttctaagcataagagttatgattctcactgccagcactccagatagatgagttttagttaatttgtttacttttctcattaaatgtttgcttgattgagaacatgagtatttgatatttactgagtcagttatattagaatgattttgtgcgtaaggtcctaaatttaacatgaatttatgactgcatgaaaaaaatgaaaatgtacctttacgattataactgggtagtttgttttgttatttttctttattttccacagcacatcatgtctgaacctgaagaaatcactactatgtctggacagaagttaccactgaaaatgtctgttgattacatttctttctcagctcacacggattaccagcaaaccagtgaatttattcgtgctttgaaaccgcctcatgtggttagtctatgaatttcatttattgtattaaagggaaaaaaagtgcatacccaggaaactgtgcagcaggcagttcacaaagcaggcatcatcacctactaatgcgacaccccctgagcagagcctttcacatgcactcggatttggcctttacaactcccctttgatttcagcaagctgccccctttctccagaactgactgactcagacctaccaaccccaatcctaatgtttttctgttattttctgctgcctctccaataatttaagagccaggcttggagtatgactgctcatttggaatgccagctccatctcttacttactatgtaacccttggcaagttacttaacctctctgtacctcatttgtaaataggaataatagctcataaggttattgtaaggatgaagtgaaagaacatatctaaagcacttaatatggtgcctggcacatagtaaatgcttaatatatatattatatatatatatatatattttttttttttttgaggcggagtcttgctctgtcacccaggctgactgcaactccgcctcccgggttcaagcagctctctgcttcagcctcctgagtaactgggattacaggtgcccaccaccacacccggctaatttttgtatttttagtagagatggggtttcaccgtcttggccgggctggtcttgaactcctgacttcatgatacacccgcctcggcctcccaaagtgctgggattacaggcgcgagccactgcacccggccgacttacttatatttttaagtatcgtgtaacttattaaaaataagttagatattttgatggaattggaaaggaggggtaagctgaaaaaagtgtgtatttttaattagaagaacactaatgaagcatgtgtccatagaaaatagatgacgtgccctttccaaatgtattggaaagcaggagaaatggccttttgttagttttgtttgtttgcttgttgtttggggtgttttttggtttgtttgtttgtttgtttgtttggatgaagtcttgctctgttgcctaggctggagtgcagtggcgccaatctcagctcactgcagcttctgcctcctgggttaaagcaattctcctgcctcagccttccgggtagctgggattacaggcacgtgccaccacgcccagctaatttttgtatttgtagtagagacaggttttcaccatgttggccaggctgttctcaaactcctgacctcaggtgatctgcccgcctcggcctcccaaagtgctaggattacaggcatgagccactgcacctggccttgcttgttgttttttaaatacgttttactgtggtaaaatatctaacataaaatttgcagttttaaccatttttaagtgtacaaaccagtggcattaattatattcacagtgttgtacaaccatcaccactgtctattttcacagcttttcatcactccaagcagaaactctgtaccgttacacagtaactccccattcccttccgccaaccctggtaatctcaaatctactttctgtttctatgaatttgactattctaggtatttcatataagaggaatcataatgcctatgatgttttcaaggttcatcatgttgtggcatgtatcagcacttcatgccgaagtcatggtccgttatatgtagaccacatgttgtttatccattcacctgtgggtggacactcgggttgtgtcactttacagcaaatgtgaagtggtatctcgttgtggtttttattttcatttctctaatgactaatgatgttgagcaccttttcatgcagtcttttgttcgtttttgagttttttctagcatgataggcctcacaggtatttgccactggcccttaatgagcagattatttggtcaagaaaaatcactctcctgtctatagcatcacagtgtgtagggtttagtcacagagtaggctcctcccaggtgtttcttattgtctgtgtgcatgaacactcccccagatttccaagccagggaggaaaagccgaattgctcttttgtgtggtgtcaccacctcatcctcagccccatttcatcctgtcactctcctggttctacttctgctgacagtttaagttcctgggttgaacttcatgctcattttcttgtgataaccagctccagcaaaagtatagctgcaggataaaattgcaatactagtagtgttggtggtagtaatgaatactagctaacattgattatttaccatgtgccggacactgtatatgtgttttatatgaactgacttgcttaatcttcatgaccgacagctgttctgcagatgagacaactgaggtgtgaaatcacttggtcaaggttacacagcttaaataagcagcagcaccaggattctgttcaggcagccaggcccaggcccttccccagcaagcagtaagcccctgccacgtgctggtgctggctatgcccagccacaagccatctaccacatgtgagaggctaagaacaatctatcttggccgggctgcagtcccagcactttgggaggccgatgtgggtggatcacttgaggccaggagttcgagaccagcctggccaacatagtgaaaccccatctctactaaaagtataaaaattaggcagggcacggtggctcatgcctgtaatcccagcattttgggaggccaaggcgagcagatcacgaggtcaggagatggagaccatcctggctaacacggtgaaaccccgtctctactaaaaatacaaaaaaattagacgggtgtggtggcaggtgcctgtagtcccagctactcgggaggccgaggcaggagaatggcgtgaacctgggaggcggagcttgcagtgagccgagatcacgccactagactctagcctgggcgacggagcgagactcggtctcaaaaaaaaaaaaaaaaaaaagtataaaaattaggtaggcatggtggttcacacctgtatcccagctacttggaggctgaggcatgagaatcccttgaaccctcgaggcagaggctgcagtgagccaagatcacgacactgcactccagcctgggtggcagagtaagactgtctcaaaaaaaaaagaacaatctgtcttgtaagatagaagttacaaaagtgaatggaaagggactggtagctaatgctgttgttgtaaataccctctaaaatattccatttggggctgagcacagtggctcatgcctgtaatcgtaccactctgcaaggctgaggtggaaagactgcccagaagtttgagaccagcctagacaacatagtgagaccttgtctctacaagaataaaataaaactagccaagcatggtggctcatgcctgtagtcccagctacctgggtggctaaggtgggaggattgtataagcctgggagattgaggccacggtgagccaagattatgccactgcactccaacctgggcaacagagcaagactctctttaaataaagaaatatataaagtaataaaatgttccatttggttctgaaatattttattaggataggtacagtggctcacgcctataatcctagcattttgggaggccaagatgggcagatcacttgagcccaggagttcaagaccaccttgggcaatatgtgagaccgtgtctctacaaaaaatacaaatattagccgggcatggtggcgtgtgcctgtagtcccagctacgtgggaggctgaggcaggaggattgcttgatccctggaggttgaggctgcagtgagccatgatcacatcactggactccagcctgcgcaacagagtgagaccctgtctccaaaaatatatcaatatatgaggtaggccaggcacagtggctcaagcctgtaatcccagcactttgggaggccaaggtgggtgtcaagagttcgagaccagcctgaccaacatggtaaaaccccgtctctactaaaaatacaaaaaattagccaggcatagtggcgtgtacctatagtgccagctactcgggaggctcaggcaggagaatcgcttgaactcaggaggtagaggctgcagtgagctgagatcacaccactgctaccctccagcctgggcgacagagcaagactccatctcacaaaaagagaaaaaagagaaccatgggtgttttctaagacagtagggtagcaatagttttgtacaagagtcataggcatttaaaactagaagagactacagaagtcagccctttacaactgtgaacatagaagcagtgaaacatggaaaaggcgtgtatctcattagtggcaaagactggagtagaaaagaagtttctttactctttgttcaaatagtaccacataaggatcaaacagaatgaatatgtgtatacaagttgaatcggctggaggtccttaaaagtagtaaagtttcataacttccaagtatgtctctatttcatatattaaatatatttcatatatttaattcaacttaaggaccatgattaagctgaatgatgtttccatatattcttttaacatttattctatgtagattttagtccatggagaacagaatgaaatggccagattgaaagcagcactgattcgagaatatgaagataacgatgaagttcacatagaggttcataatcctcggaatacagaagcagtgaccttaaacttcagaggagaaaaactagccaaggtaaaaggttatggttcctgtctgtccaatccatgttttttcttcaggaaagactgtacttcttaagaaaatagatctttagtcaaaagaatatgcttatttctgtctacttgttacactacaggaattttatccttatcctttttggcttcttttggttctgtgcattcatttcttcaggtggaaaatgttcagctagattagattttttgtgtgtgtgtgtgtgagacggagtctcgctctgtcaccaggctggagtgcaatggtgcgatctcggctcactgcaacctccgcctcctgggttccagcgattctcctgcctcagcctcctgagtagctgggattacaggtgcgcgccaccacgcccagctaatgtttgcatctttagtagagatggggtttcaccacgttggccaggatggtcttgatctcttgaccacgtgatccacccacctccgcctcccaaagtgctgggattacaggcgtgagccaccgtgcccggcctagattagatcttaatgcagctgaatctcatagctctttaatccatatccccacttgcttttcctacccacatctgagggtaaagaactgtttgttactgtttgttactgtagccagtatagccttgtgtccacctcttgtcattctccctgagaatctgaagataggctcatatctctaaacatatatgtttgtgtagatatgatggaatatatgaaacattttctctttaaaaattaatcggccggacacggtggttcctgcctataatcccagcactttgggaggccaaggtgtgtggatcacttgaggtcaggagttggagaccaacctggccaacatggtaaaaccccggctctaccaaaaataaaaataaaataaaaaaattagctgggtgtggtcgcaggtgcctgtaatcccagctacttgggaggttgaggcgggagaatcccttgaacccaggaggtggaggttgtagtgagctgagatcgaacctgagagatggaggttgcggtgagctgcgatcgcgccaatgcactccagcctgagtgacagagtgagactgtgtctcaaaacaaacaaacaaacaaaaaagaagtaatcaaggctgggcacggtggctcactcctgtaatcccaggactttgggaggccaagtcaggcgaatcgctttagctcaggagttcaagaccaggctcggcaacgtggtgaaacccagtctctacgaaaaatacaaaaattagctgggtgcagtggcatgctcctgtagtcccaactacctgggaggctgaggtgggaggatggcttgagctccagaggttgaggctacagtgagccattgtcctgtcacggcactccagcctgggtgacagagcaagaccttgtctcaaaaaaataaaaaaagaattaatcatttttgagagtgaaatgtaacattttcagaatttaaagttgaaatagttaaggaaagcctgagctggctttttagagggatgctgtcagaagtctgcatctttacttctgttgatcacaactcgtttagaaatacttctaagagaaactttttaaaaattacatatataattttaaatttttaaaaaggaattgaaatcattatgttgaagagatatgtgcaactcccatgttctgtttttttgttttgagatggggtcacactctgttgccgaggctggagtgcagtggtgcattcatgacttactgcagcctcgacctccctaggctcagctgatcctcccctctcagcctcccaagtagctaggactacaggcacaaatttttttttttttttttttttttagaaggagtcttgctctgtcgcccaggctggagtgcaatggtgccatctcggctcactgcaacctccgcctcccaggttcatggaattctcctacctcagcctcctgattagctgggatcacaggtgcccaccaccacgcccggctaattttttttgtatttttagtagagacagtgtttcaccacattggccaggctggtctcgaactcctgacctcaaatgatccacgtgccttggcctcccaaagtgctgggattacaggcgtgacccaccgtgcccagtctgaggctcaaacttttaatgatttagttgaaggtttaagtatcaacatatgggccaggtgctgtggctcacgcccataatcccaggactttgggaggctgaggcggacaaatcatctgagatcaggagttcgagaccagcctggccaacatggagaaaccctgtctctactaaagatacgaaaattagccagtcgtggttgtgcgcaactgcagtcccagccactcgggaggctgaggcaggagaatcgcttgaacctgggaggcggaggttgcagtgagccgagatcatgccactgcactccagcctgagcaacagagcaagactccgtcttaaaaaagcaactttacgacacacttttaatacataatgagccaaacctgcagacgctaatgaatatcctttcttgaaggtgaattggaggaaaaaaagaaattagcaaaacttagggtatgaggtttttgttgtaaatagtcgtagttactcctgagtcttactgtccacaaaacttttcaggggccgatttaatagtatttttcttatacctgtagaaaaatatactcagttgagaatctagaactgtatttcacatactctgctggtggtggatatgtggggagaaaaaaaaagttttgcagtcagacagtttagaagatgaattgaactgagttcaggaaaagttgggtttcttatcggagtgttctgtttctcacccataattttaatgatttaaaatcattacctttagttatttttctctctcaagtacatcactgtattaaaattagtctcctaggagcaaaggttcttttctgaaagctacctacaattaaggagaaaataaccctaggaaatactgtgaaatacaaccctctgtgtttataattatgagaacaaatatagcactgcctggttgctgtttgcccttacttgcttaaaggcaaacaagtatggaacacactacctttattcctttgagctcatttatttgcagttgagagaagttatatttaagaatactgggtttcagccaggcttggtggctctcgcctgtaatcccagcaccttgggaggccatagcaggcagatcccttaagctcaggaattgaagatcagcatgggcaacatagtgaaactccatctctacaaaaaatacaaaaataagccaggcatggtggcgcacatggtgagcgatgatcgcaccactgcattccagcctgggtgacagagcaagactgtctcagaaaaataaataaatgaaactttttttttttttttttttgagaaaaagtctcgctctgtctccaggctggagtgcagtggcgcgatctcagctcactgcaagctccgcctcccaggttcacgccattctcctgcctcagcctcccgagtagctgggactacaggcgcccgccaccacggccagctagttttttgtatttttagtagagacggggtttcattatattggccaggatggtctcaatctcgtgacctcatgatccgcctgccttggcctcccaaaatgctgggattatgggcgtgagccaccatgcccggccataaatgaaactttttaaaaatgaatagtggggctgggtgtcatggctcacgcatgtaattccaacactttgggaggccgaggtgggcagatcatctgaggtcaggagttcaagaccagcctggccaatgtggtgaagccccatttctactaaaaatagaaaaattagccgggcatggtggtaggtgcctgtaatcccagctacttgggaggctgaggtgggagaatcgcttgaacccgggaggcagaggttgcagtgagctgagattgtgccattgcactccagcctggcgacagtgagacactgtctcaaaaaaaaaaaaaaaaaagaatagtgggtttcacgtttgtagtatttttgtttttaaatggttgttattttattctcttaaaaatgtttctccctcaatgtatgagctcacccataacctgtttttattgacctttttattcaaagccgctgctgctgcttttagtgttaggtgtaccacagcctcccaggtttgtatcagtgggcctcactctctgttatgagtttgcagccagcctgagggagtgcatgtgtgcgtttcacggggacttcccggccttccctactgcagtgcagctagtgagagctttcttaagccccggcacctagtaagttacttgcttgttgaactgattagaactgaactgtgccagatctgccactgtgactcttccctttgacattggtagcaatgcaactgccctcatcatagagatatcaaacattttatgtttttcgtggttaaatccatatgttgttttcatagttcaaaggtgttatggtcttcattatgatgaactgcattttattacctgaaaaactgcattttaccaggttctattttcttcaagtattttttttttacaggttatgggatttttagcagacaaaaaaccagaacaaggccagcgggtctcaggaatacttgttaaaagaaactttaattatcacatactttctccttgcgacctgtccagtaagtatactattaaatgtcaaatccaacttcaccttagcactgaaagaaaatctatgaaaacttctcttcaccttgtggcctaatgttatgtaatagacaaataataaaaaaggaatgaggcaagttagctaattagctttgtggggagagaaaaacacctcccatgaactactgaaagattgaaattattggtgaaatcactttcttcatctttggaaacataagttcatttctgagttcaccttgttttctaccctctacaacagacttgtgggcttttattttctgaagtgactttggattccccagagaagccgtttggtttttatgacctttgcataagcatttcagttttttatgacctttacatcacttgcagggcctttgtattccttcaccattccaaaaggagtaggaacaaaaacttgtataatttctttaaaagcaaaaaagtattaatgtaaagcctaattttttcattacattgaaactttcaacatccaaataagtaacaccaactatataactgatgcctctaatgtgtgtgtatacattgaagctcattatagagaaaaatgaaaaattgggcagggtgcagtagctcacgcctgtaatcccagcactttgagaagccgaggcaggtggatcacgaggtcaagagatcgagaccatcctgaccaacatggtgaatccccgtctctactaaaaatacaaaaattagctgtatgtggtggcacgtgcctgtggtcccagctactcaggaggctgaggcaggagaattgcttgaaagtgggaggtggaggttgcagtgagctgagataatgccactgcattccagcctagtgacacagcaagactccatctcaaaaaaaaggaaaaattgcacaaaactaataagattacatttaagtttgtaaattgcttttttcccatagttgatacacatttccatatgcattctttgtctttataaatttactgagccatcaataagtcattttccaatgaatatggtattattttcgagtaaatactatgctcaaggtgatttacatggtactaatacattatatgtgctttatgcaggaataaaaaatagcagtggcccggcacggtggctcacgcctgtaatcccagcactttgggaggtcgaggtgggcagatcacaaggtcaggagttcgagaccatcctggccaacgtggtaaaaccccatctctactaaaaatacaaaaattagctgggtgtggtggcatgtgcctgtagtcccagctacttgggaggctgtggcaagagagttgcttgaatgcaggaggcagaggttacagtgagccgagatcacgccattgcactccaacccgggcaacagtgcgagactctgtctcaaaaaagaaagaaagaaatagcagcagtggtgaggtatttacctgtgagattgccctgctgtcagttttcatagcatcataggtcactgtctgacttgtgccttcattctgagttagtgagctcttatactctttttttttttttttttttttgagatggagtctcactctgtctcccaggctggagtgcagtggcgtgccgtctctgcttactgcaagctccacctcccgggttcatgccattctcctgcctcagcctcccaagtagctgggactacaggcgcctgccaccatgcccggctaattttttgtatttttagtagagacggggtttcaccgtgttagccaggatggtctcgatctcctgacctcgtgatccacctgcctaggcctcccaaagtgctgggattacaggcgtgagccactgcgccgggcccgagctcttactcttatgccacatagtcccagcccttgaaatctgtctaatgagggaagcagtcttgggaagagctaatcccagtattgctcagtggcatatagaagctcatgatacatatgtgaagagaaactgtgcacctcaggagctggaaaaagctttgtaaattaggtagcccttgtgccaggtggtgaaagattgttgggagttaccaaggaaagaaggcagatgacagctggcataccagctctgtggcatccaagaacctggtatgtttggggacatgaggtgctttttttttttttttttctgagatgaagtcttgctctgttgcccaggctagagtgcagtggcacgatctcggctcacttctgcctctgcctcctgggttcaagcaattctctgcctcagcctcccgagtagctaggactacaggcatgcgctaccacgcctagctaatttttgtatttgtagtagagacggtgtttcacaatcttggccaggctggtcttgaactcctgatctcgtgatccacctgcctcggcttcccaaagtgctgggattacaggcatgagccaccgcgcctggccataaggtgctttcttacagctggagcagaagttaactgaaggggagaggtagggacatagggagatcagtggggaaatgtaaggtggtaccaaattaaggagcatcttgttagctttctgaaaaacatgttcacatttacttgcttttatttcttttttctttgctcctggtatgtgttttgtaggactagtatttcttcaagtctcttctcattttctcttcagattatactgacctggccatgagcacggtgaagcagacccaagccattccatatactggtccctttaatttgctctgttaccagctgcagaaattgacaggtgtgtgtgtgtactgaaattcatttcattgttttctgtcttttagtaagataattttctatctagaaaagaatgttacttaattttgataattgtctcagaattgtgtaagttttataaatatgtgtgatcatgttattattgcctttatgtgaaattttagaatatacactcatattcttgcctgacggtcctgggaaaaaaataaaaacttaaaaaaaattaaaaaagaaaatatactcaaattttttttaattccataatacttatctttgacccaattaaaatttagtagtctttgttccttatgtttgaaatctattttccttgaccatacctaaaattttatctgtttcttttctttgatcagtgaaaataatttttctggttctattgataccagtctatacagcaggttttataagagttcatgaccactggccaaaggccagtgagaaaataaacctagtctgctttcattattagaccatttgagttcgagattttgtatattaacatcatgaggggccgtgactaaattaaaaggtgtagactttctgatagagcaagaatacttcatattacaaaatacattttccatcagtaacgctcttcatgactcatgaagtaccaccataaaataaaccagtagaaagaatcttttttttaaaccttggaaccttgcactaggataatctgtcataacatagaaggttaataaaatatgtctgaactgtccttgattaagaggatgctagaaagaccagaaaagtctcttcaacaatagaattccgctgtagaatgttgacgcttacgaagacagaaggtagatgaaactagctggcaacaattgacaaattttatgttatatgttaagatgctagtggaaggctaaatctcttgtatacaaaagatagatgtttgagcatcacttaagtttgccactgataaaatgtttgatgtccagggtaaatgctatctagttgaatgtttgcaatacatgttcagacctttccgttgctgtactttgctgtttaaaaattgactatacaaatgagttactaactttttaattgtgtagctgctttattttagctgtctctataaacaaacgaatggtctctggaagattatcagaaaagtatatacatcttatagttatgtctttctttcaggtgatgtggaagaattagaaattcaagaaaaacctgctctgaaagtgttcaaaaatattactgtaatacaagaaccaggcatggtggtattagaagtaagaaaagatcatttacctaaacaatgaggggaaaaaagttttaaaaagagttcatgaacaattgtagagaaaattagtttcttcccaattagaaaaagaatattgttggaaagtatatgtgtgtgtgtgtgtgtgtgtgtgtgtgtgtgtgtgtgtgtgtggttttaaggatcagcattaagtataattaagtagctgagcattttctatgtagtcacaaaaaaacctaataataaattaagggttcttatttagtatgtgtgataaatatagtcctttcctataagtcttacctgattttgtggtactccaggatgtctttagttatatcagaaggttttacaattcttaaggtaaaaatttaattctgttaaattaaaacaaacttaggtaccactcgttaaaagagcagaattttgaagattcaaataaacaacaataaagtgacccaaatctggaaaggatagaaattattaaattaagtgatatggttcctattagaattttaaactccaccttgtggagtttggaagacagataccaaaggaattacatggttgattttgatagattggcacctattaagtttaaagaaggactttcaaagtgagtcctatcattgaatagtccagggaggtaccttgtctactgctatgccccaaggtagaattgtatataaattgccaaggtagatggtgaactatttcattcatacattctaattttttttttctttttttgagacagagtcttactctgtcacccaggctggagtgcagtggggtgatctcagctcactgcaacctccacctcctaggttcaaacgattcttctgcctcagcctcctgactagctgggactatacaggtgcatgccaccatgcccagctaatttttgtatttttagttagagatggggtttcaccacattggccaggatggtcttgaactcctgacctcaagtgatccacccgcctcgcatacattctatttttaaaacaaaaaagatttgtcagctttggtcccgatgcaattctgtgatttaagtctaaatttgattcataaggctaaaagcaactaaagaaagtgtcaggccaggcccagtggctcacagctgtaatcccagcactttgggaggccaaggcaggtgaatcacctgagatcaggagttcgagaccaccctagccaacatggtgaaaacccgtctctactaaaaatacaaaaattagccagacgtggtggcaggcacctaaaatcccaactacttggaaggctgaggcaggagaatcacttgcatctgggaaacagaggttgcagtgagccaggatcacgccactgcactccaacctgagtgacagagcgagacgctgtctcaaaagaaaaaaaagaaagaaagtgaaaaggagtagttatctataaacatgaagttacatagaacaatatataaaatgttaatatcagaaaaagggggaagttattggagacattaatttagctcattctaccaaatactattagaggctgtgtatgatggctcacacctgtaatcctagcaccttgggaggccaaggtgggcagatcacttgaacccaggagttcaagaccagcctgggtaatacagcaagaccctgcctctataattcattcattcattcattcattcatttatacttacatagtagataatatatttttgttcctagggtaaacatgtcagagattgtaccctaggaacaaaagccaggggatctgaggcttagtgtgagaagcaaaagtaaatatttaaaaatattaccctcttggccgggcgcggtggctcatgcctgtaatcccagcactttgggaggccgaggtgggcggatcacctgaggtcgggagttagagaccaggctgaccaacatggagaaaccctgtctctactaaaaatataaaattagccaggcgtggtggcacatacctgtaatcccagctacttgggaggctgaggcagcagaattacttgaacctgggaggcagaggttgcagtgagccaagatcacgccattgcactccagcctgggcaatgggagcaaaattccatctcaaaaaaaaaaaaaattaccctcttcgcattctgtctgtagtcatatactatactaaatataagcattaggaatttgagttcagtcccagcaccagtaattatcctgtgcaagttacttttaagtcagttttctcttttataaaatgaaattaatcgtgctgttatgaaaattaaatgataatgcctataaaacactgtgtcgaaaggaagtgctcagtaccatttacttttgtttacagaaaattagaggactatagtattattaatttcagtaaacaatgagtcagttaatttcattgaaaatgctagaagcagtagttccatatgtacagtccatggtttggtgggttgtagttgtagcctttgtggttggtcaccctaggtaggtcacttcctaattctgccttttgctttccagtggctggcaaacccttctaatgatatgtatgcagatacagtaacaactgtgatattggaagttcagtcaaatcccaaaataagaaaaggtaagagttcatttttatccttttttttttttttttttttttttttttggagacggatactagctctgtcatccaggctggagtgcagtggcacgatctcagctcactgcatcctccacttcccaggttcaagcaattctcctgcctcagcctcccaaggtgttgggattatagatgcctgccaccacacccagctaatttttgtatttttagtagaggtggggtttcactgtgttggtcaggctggtcttgaactcctgacctcgtgatccgcccgcctcagccttccaaagtgctgggattacaagtgtgagccactgcgcccagccactcatttttatcctttctttcatttttcttatgtttctgtgaactaaaaggcagtacatagactcctaacaaacttgatcatttctatgtaatctttaagatataaaatacacacagcaatgcatgttgttagtattttgcttatttttgtcctggctcttcactcatactgcaaaaacctggctgcaattaagactaagataaaatccttttagaaacagtcctcttaaaaataattgagtcaggccgggcgcacggatcacaaggtcaggagatcgagaccatcctggctaacacggtgaaacctcgtctctactaaaaatacaaaaaattagctgggcatggtggcgggcacctgtagtcccagctactcgggaggctgaggcaggagaatggcgtgaacacaggaggcagagtttgcagtgagccgagatcacgccactgcactccagcctgggcgacagagcaagactccgtctcaaaaataaataaataaaaaataataaaaataattgagtcagaaatttcaaaatattgatgaattgagccagtagattaggaagatatgctactatcttcatgtttaataaaatttgttgaatagaattgaatctccctatgggacaatttgcaaccagagaaaacagtgaagatatttttgtgttacttctttgattctattttatacttaagtcagcataatatatgtcttttttttctttctttctttctttttttttttttttgagacaaagtcttgctttgttgcccaggctgctctcaaatgcctggggctcaaatgatcctctcacgtcagcctcctgagtggctgagactacaggcataagccactgtacccagctctttacatgttttgagctgtgagtctccggcatatggagtagtcctgtgtgctgtgctgggggaagtgaccatacgggaagtattctgggaagcctcagcctttacccttcacacaccattagatcctggactctcagagaatattattgttccttgaaaatatacagttagttagttctttgatttcatgagaaaaaagttgagcagactactttgtaattcatttcttatgctgcatctataatacaaacaaataaatacttagacaatctaaatctgttattcatttgagtcactggtaagcatttgaatttgctttcagtaattgtaaaaatgatcatttggacatcatttgataacttgttttagttgaattaactcatgggaaatggctcctcccatgtgcatgtaacacaggagacagctgtgcatatatataagccacaacgcatttatataagccacagaagaatgccgcaagattcttacatgatgctcagtgtcacagtcttaatcctggggtagaaacatattgacagaaaaaatgcaattgtcaattttctcttacagttgggcacggtggctcacacttgtaatcctagcactttgggagactgaggtgggtggatcccttaaggtcaggagtctgagaccagcctggccaacatggtgaaaccccatcttttctaaaaatgcaaaaaaaattagccaggggtgctggcaggtgcctgtaatcccagccagctattcaggaggctgaggggcgaaaattgcttgaaaccggggggcggaggttgcagtgaacagagatcacaccactgcatttcagcctgggtgacagagcaatactccatctcaaaaaaaaaaattgtttttgtcttacttatcttaggtggtaaaaataaaggtgtgcagggtgggaaggaggatcttttttttttttttttttttttttaaatttatctagagatggagtctctgctctgtcgcccaggctggagtacagtggcaccatctcggctcactgcaacctctgcctcccgggttcaagcgattctcctgcctcagcctcctgagtagctgggattagaggcgtgtgccaccatgcccggctaatttttgtatttttagtagggacggggtttctccatgttggtcgggctggtctcaaactcctgacctcgtgatccgcctgtgttgacctcccaaggtgctgggattacaggcttcagccaccgtgccgggcctaggaggatcttttaaaagatcatgagtaagtagtggtacagaagttaggaacggtgacgtggggaagagggttaggtgcggagagcagaatcacgcccagggctttgggccacgcagctttcagctgtaaggcccccatccttctaagagcacagctggccttcacttcctatcttagtctgttcagttcaaatcaaatgccaccagggttgctttctcttcactatatttctgatagcccttttataaaatgaagtcttttttgtaatatagtcaactaattagaaattgatatacttttctgaaaaatgaagtttctatgcaaaaatggcacttttttaggccggttaggatgttgtgtgactacaaggtctttggtgatgtttagtgtctgagctctgccagcctgttttccatgtggcagaggagggatcacagagatgttgtcaggatgtcatctgctgttctgatgagggctctgcctagcggtgatgctgaaaaacaagaggtgctgtggtatgacagataatctccacatagctcgtgtgtgttttatacgggaaggaatacatgacctgtcataggttggtttgcctttatcttgattatttctcttaatgctccggtccaaaatgaaatgtacctttactctgatctgcagtaattgaatttaaattaattatcactatattattagtaatccctcttatgctaataataaaaacattccttcctttggttagcctgtggccatttcagcagaggttcattgcagacaggttagaactgggctgtttccgtgtgttccgtgtatttagcatttgttcagctggctgggtgccttgtgtttcttagttcttccccattttgtagtttatggagaatgaggttttatattcctctgggatgatgaagtgtttgcatattttcattaacattcatttgacagatgtttactgagcacctgctccccagcaggcatgcctcaaagtgcttaggaaacatcagtgaacaaagcaaacagatctgccccctccaaggatctgacattctggcatgtcccagggcttcctgatagggtttggagttgggcagatcccatagggtcttgttggctattgtaaggacctcagactttcagtgtgagtaaaatgaggctatgctgcagagctttgagcggggctgagacaggatctgacggagtttttaaaggactgccgtggtgcttgctgaaagtactgttaggagggcaagcaagaaagcagaggctccagctgggagcttcttcagtcatccaggtggcagacagtggctcagattagggtggaagtcatggggatatcgcaaagtgctggattctggaggtgttctaataaagccagcagtatttcctgttggattagctgtaagtggtgacagaaagagaacagacaggatgaactttaagataatgatccagggtatgtatgtgatatgtcagcatggacagttgtcactcgtggggctaagtgacaggttttaataagtagcacttgctcctttcaaaggtgacaagtattgcaagaactggtacatgtgacacttatgctgctcatgaggaagttgattctgtatatttattatttatcgaactgacttcttcctatccaaacttgggattttcacatttagagcagagtcagcgactgtggcccacaagccacacctagcccgcctgctttggtaagtatagtgttaccgaaacacagccgtgcgcactggttcatcatctctgatgcctctttcctgctacagcagcagaactgagtcattgcaacagcgaccctgtggtttacaaagcctagaatgccatctggccatttacagaaaaagttgccctcttctcaaggcacctctgtgaaacaatccgattcttccttgatggcatttttctcccttttcatttcttagcctcctgacacttcagtccagattctggaaacacaacttgtatttgtatctgtggtgtatgtgtgtgtgtgtgtgtgtgtgtctaaccaaccacaatttatgtgtccccattcttaaccaaaggggaaatcttatatattttcaaaatacattattttgtttttatattccataacattcttctattttacatggcacctgttttcagcatgtgtgtgtcctgttttgacacacagacctactaaggacaggtatacctgtctgattgtatagttctgtgtttaatatgatctcgtgtctgatgagtttgtctaaatattaatgcaggaatttgcaaatatatatatacatatatatacacacgtaaactttggaaagtttcttttgatagtttcatagcctagatatttattttgtaatatattttgtgagattgtttttacatgtcaattaagtgcttattttagtaattaatgaaactaatgattataattaaagtataaaattctgttatatagttttcttggctagcacctggttagttttttgtttttgtgtttttttaatatttttatttttattttactttattttattttttgagacagggtctcactgtgtcgcagacttgagtacagtggtgcaatctcagctcactgcagcctcgacctcctgggctcaagtggtcctcccacctcagcccccacaagtagctgggactatagacgcacatcaccacgcctggctaatttttctatttttatagagacagggtttcaccatgtggcctaggctagtctcaaatgcctgagctcaagagatctgcccaccttggcctcccagagtgctaggattccaggtgtgagccactgcacctgggcttactatttttttttaatggagatggggtcttgctatgttgccaaggctggtctccaactcctgggctcaagcagtcttcccttctcagcctcccaaagtgctgggattacaggcgagtagttagttgtatatacaattgaaattcacgaattaaaaagaattagatgaagtatggtttgaattctagaatagtttaggagaaatgacaagttgagtcttttccgtagagtagattgaaataggtatgtgggagtgcagaagtgagttaataaagctacacttacatgatacaatattttaaaaagtcatagtgttacatgagaaagtaattacttgggctgggaaattgaaagtgcattgaagaaatcataatttttgaagtctctttgaaatgacagagtcttagccaggcacggtagcacacacgtacaggcctagctacttgagaggctgagatgagaggatcacttgagcccaggagttcaaggttacagtgagctatgattgcaccaccgcactccagcctgggcaacagagcgagacattgtttctaagggaaaaaaagaagaaagaaattacagtcttatattatattttcctgtttataggtgaggccataagattatttctggtattttcccccatatcatacacacacacacacacacacacgcgcgcgcgtttatatataaaaaatatataaaagaggaaattggttatgtatatttattatttatcaaactgacttcttcccatccaaacttgagattttcacatttgggccagcccagctttcaactcttaaggccccccatccttctaagagctcagctggccttcacttcctatcttagtctgttcaatcccaatcaaatgccaccaaggttgccttctcttcattatattctgatagcccttttgtaaagtgaagtctgttatgaacatgaaatgaaatgatgacaatatccatatatatggggtgtgtgtgtgtgtgttgtctgaaggattttaaaattctgcactactctttgtaacagcattattgatacataattcacataccatacaattcatccatataaagtgtagaattcaatgattttttagcatattcagagttgtacaaccatcaccacaatcaactttaaaacatttacatcacaccaggccagacatggtggctcacacctgtaatcccagcactttgggaggcacaggggagcagattgcttgaacccaggagtttgagaccaacttgggcaacatgctaaaaccctgtctctacacgcacacacacacgcgctcacacacacacgcgcacacacgcacgcacacacacacgtgcgcgcacgcacgcgcacacacgcacacaaagacgcacgcacacacgtgcgcacacagacgcatgcacacgcacactgacgcacgcacacagacgcacgcacacacgcgcgcgcgcgcacacacacacgcacacacccacgcactcgcacacacgcgcacacacacgcacgcgcacacacgcacacgcgcacacacgcgcacacacacaaaattagctgggcatggtgatgcatgcatgtagtcccagctacctgggaggctgaggtgagaggatcaccagagcacagaggtgaaggctacagtgagccgtgatcataccactacagtccatcctgggcaacagtgcaagaccctgtctctaaataaataaataaataaatgcacacctccgaaaaggaaccccatatcccttacgtatgatgccccaatctctatattctcaccaactcaaagcaaccactaatctacttcctgcctccctggatttgcctgttctcagcgtttcagataaatggaatcatacaatatatagcctttgatgactggtttccttcactatgctgtgttcaagtttcatccgtgttgtcacataaattggtacttccttcctttttatggccaaataatttcccattgtatggacacaacacattttgtttatccattcatctgttaatggatacttcggttgtttctattttatgggttttatgaatagtgctaccgtggagatttggatgtaagtttttctgcagacatatgttttcatttctcttggatctgtacctaggagtagaattactaggtcaaatgctcactgtttaactttctgaggaagtgccagactgtgagctctgcactcttttgctactgttgatgcactgagttgttgaatgaggggtcagagcatgcctgaaactccagattaaggggggcccattttcccaagctgtcagatttgttttggaaggaaagctgagtaatttaatgggcaagtcattttaaatattaatttttattaaaataattatatctaatagaaagctaaatttatatcacattttagataaaagacttcacagatctttgagcttgaatatgtccctagaattcctggagttaattgcccgtggtcataaatgtaaagtttaagaaatgtgggaaataaaactaaaaataatattaagtgtcattttgtggttctttaataagaacatgaaatattggagaaagggtgaaaagatgtaatagaaaattttttttaaatacacataaaaagaacatgaaattaaatgatgaaaatatccatttcctttagcaggcaaataatacaaatccctgcttgtcactttaaggattccatagttattcactttaacttatcagtaaccagattctgattattgatttggaaattattctgaataggaatttagaaactgaactctctgtcgcttttttttttcccaggtgcagtacagaaggtttctaaaaaattagaaatgcacgtttacagcaagaggttggagatcatgctccagtaagtttttcacccattatttctcaacaagacagtgacagcggccggaaggagccctggattcggctctgactccttcaaggactggggcgtggctctggccaggccactgccatgctcggaggcctgcttctctgttaggaaagagaggggctggaaccgttccctgccagctctgcactcacctgtgacctgctaggtcagccgtttgtgtttcatttaatacagtgcttcaggatgctggcacagggctggcacagttagcaagcgttaaaacattctcatcaaggacaagttcaaaaatcttagctgaatgttactgtatcttcaagaattattttatatatttacttgttaaatgtgaattctttgtaaaatggtgttcttctagactcttcttagtctgtaagcgatgaattaactttaaactaagtatttctttttattttattttattttatttctatttttgggagatagagtcttgctccattgcccagactggaatacagtggcatgatcttggctcattgcagccttgactcccaggctcgagcaatccgcctcagcctcccaagtagctgggatcacaggctcgcaacaccatgcccagctaattttatttttctggagagacagggacttcctatgttgcccaggctggtctcaaattcctgggctcaagggatcctcctgccttggcttcccaaaatgctggaattacagatgtgagcccttgccccatgaaacggtttaacaaagtaaggtggcctgctagtttagaaggcttttatgctaacatttctgttccttcctttctttccccaaaattctacactgacctttttttttttttttttttttttttgagacggagtctcactctgtcgcccaggctggagtgcagtggcacaatctcagctcactgcaacctccacctctcgggttcaagcgattctcctgcctcaacctcccgagcaagtgggactataggcgcatgcccaccacacccagctaatttttgtatttttagtagggacagggtttcaccatattggccaggctggtcacgaactcctgacctcatgagccacctgccttggtctcccaaagtgctgggattagaggtgtgaacccccgtgcccggcccactaaagcagcagtttagtggctttaaaaaaaaatgatagactttaaatgatgactttgtttatagaagttgtcatacatcttcaaaacagtattctctgtgttgtcattttgattttaaagagcattcctcatacaaaaccagccaacagtgcaggcacagtgattaccatggccgttgaaaaggccagagattttactggttcccacccctggagcctctggttctcttaactcattttgcagagggctcaagtctgccagcgttgaagtctgagtatcttaatcatttttagatccttcacccctttggcagtcaggtaaggctgtggggcgggggcaggggacacacatatatgcagttttacctttgatttcaaggaggttagacaaccccctccccacaggctatcctgggacccccggttaaacagccctattgtagaaggtgggtgttgctgaccagggacttgactacaatagttctgttggcggccctgttccctggggctctacaagaatagaaaacccgtgtggccctggactggccccgctctcccacgtgctgcagtcggggtgcagaatggaagttcacattgctgtggctggtcctcaggagccgtggggagggcagtctgcgggaggctgcggcccttccactggactttcactctggccttcttccctgtcctcctgacaccactcctcccgcctcccctccctctccctcacctcccacaaacacaccagaactattcaactctgaggaacaggagtatgagacagcttccattcggccaggaatgggaggttcccatgtccttaaacttcaaagccaatcgtacccttaaaaatgcagctatttccccagttgtttaaacacttaggattagataggagtagatgtattggtttcttcagagaagccaacagtggatcacatgaaaatggaaccttttttcctatccttttgaatacatttctgtgtttaaaatataatttttttggctgggtgtggtgacccacacctgtaatcccagcactttgggaagccaaggcaggtggatcacttgaggttaggggttcgagaccagcctggccaacatggcaaaaccccatccaaaatacccctactaaaaatacaaaaatgagccaggtgtggtggtgggtgcttgtaatcccaactactcaggaggctgagggaggagaattgcttaaaccaggaggcagaggttgcagtgggccgagatcgggacactgcactccagcctgggcaacaagcaagactccgtctcaaaataaataaataaaataaaatataatcttttcctttgtgctagggtcccacctaagtttattcacacatatgatgagcagtaactgcctgaagatgcaaggagttgattcccactccccacttcccccgcttaatacagtgttgtcagtgcttaactgtcctaggctgaccatggtccatgggttgtttagagtcactgcctgcctttcttacctgcattcagcctgctggtggactgctgtttcctaacacctctgtaccaatggggacgatgttgaaattaaccatcaaaactgtttctctcgatgacagaggcaatgtcttagtgccttctttatccccagctactagcacagaaggaatctgccacacagaagatgctcaataaataccaagtttaattaaagtaggagtgcacagctagtgggcttgggagccatttaaacctagatacctggatttgaatgccggctcagctgtttactagctgtgaggctttaagcaaatcacttaacttctgtgtcttgttttcttcacatgtaaaaggggatccttactaaaattataggttaagataatgtatataaaccacctagcatgatgcctgctgaatagatcattcttgaataaagctgtgtattttccctgttttataaacttaataagctgtatcaaggcaaataagaagcttgtctcaaaagtaaatacaggctgggcatggtgactcctgcctgtaatcccaacactttgggaggccaaggcaggtggatcacttgaggctaggagttcaagaccagcctggccaacatggtgaaaccctgactctactaaaaatacaaaaattagctggctgtggtggtgcacacctgtaatcccagctactagggaggctgaggcaggagaatcacttgaatccgggaggcggaggttgtagtgagccaagattgtgccactgcgctccagcctgggccacagagcaagactccatctcaaaaaaaaaaagaaaaaaagtaaatacagtattctgctttagaactaggacctatcttcagttttattttttcctcaaatatataaagccgggcattttcactaatcctgcatttctgcttattttcagggacatatttggagaagactgtgtaagtgtaaaggatgactctattcttagcgtcacagtggacgggaaaactgccaaccttaacttggagacacgggtatgtagctgctctttcctacgtttcaagacatttgggaaataaagtgaaggcataaataatctgtgctctcacactcaacagtctactgttgcatattggcatttgcttccagtgtttccaacatttttttcacattgttctttttatattattatggttgaagttttccgtgtttttccgggttactgcatagtacaaggttcgcgtgtatgccactccattgctgtcctcttccataatacagcttagttcacctcatcccttctctagtttggcatctagttgactctccattttttaaagaagccgctcttctgtttgcaccagcaagatccaagtggattttccaaacagttcaaaaccagcccgggcaacacagttaaaccccatctctactaaaaaatacaaaaaaaattagccgggaatggcggcagctgcctgtagtcccagctactcaggaggctgaggcaggagaattgcttgaaacagggaggcagaggttgcagtgagccaagatcacattactgcactccagcctggatgatagagcgagactctgtctccaaaaaaaaaaaaaaaaagaactagaggccaggcgtggtggttcacgcctgtaatcccaacactttgggaggtcaaggtgggtggatcatctgaggtcaagagtttgagaccagcctggccaacatgatgaaaccccatctctactaaaaatacaaaaattacccaggcgtggtggtgtgcctgtaatcccagctacttgggaggctaaggcaggagaacccaggaatcaccttaacccaagagacagaggttgcagtgagctgagatcacatcactgcactccagcctgggcgacagagcgagattctgtctcaaaaaaaaaaaaaaaaagaagcaactagaagattattagtgagtttcagtcaaattcagtaccaaatgttgagtagatagccacatccattccttgccaagtaatttgtgtggcatagatgaacttccctggagtatcatttactagatcaaactgtgggctttgatgtaaatgtagtttactagactttccccagtctttcaccccagcctcaagtcatcactaattaggaccgtgctgctgtcaggaagcactgcacgcccacaagtgtgtagggcggccgttctgtttcatggtaatcagtcccaccatgacctctgcacacacagatgattgttcttttttttagtttgagacccggtctcgcagtgccgcccaggctggagtgcagtggtgcagtcacagctcactgcagcctcaaccttcccggctcagtgatcctcccacctcagactcttatctgggaccacaggcacacgccaccacagctggctaattttttatgagatgatggtttttttaaagagtattcatttatcttctatataatcattatagacttaattctaacagtcttgtttgtgcctcactttcagactgtagaatgtgaagagggaagtgaagacgatgaatccctccgagaaatggtggagctggctgcacagagactgtacgaggccctgacgccagttcactgagactgtgcctgtatatgaactttgaaaaaatacttgactctacttttgttacctaaaataaaatgcattcgtttctctgggggagcctgtttacttttaatgtcaaatggcctttatttcaacagcctgaatactgctaaattgctaattaatttgtccattattctagaactaactactagatcaactgcccattattttagaattttggattcttcttccaggcatgtatgtgcagctcccattgaaaccatcaagatctgccgatagcaaccgctgctggttaccctctcctctggggtaaccaatttgagttaataataaggattctaagttgcacttgaatcttttctgtcttcatctccactgctgctgttcgagtccaagtctactctcccctctgaattcctgcaaccacctccatctcctcccctatagctgattcctggaacagacctggcctcaagcctctgctgcttgaaggccttaatgaagtccttgtgataaagatgaagtccaggcacctttgcttgctctagcaggggctctcaatctgggctacccgtgggaatcacgtggggtgcatcacaagtgcacctgtgcccaagtcctgccaccaggaggtgagttagtccggctggaatgagggccctaggttggatcttagttgtaaagctcccccaggtgatccaagcgagcttgggacgagcaacctaaagaaagtcatgctctacgcccatcgccccgccccagggagcggggtcggcctctgcgccggcgcccctggcccttctgttactcatctacagctccgtgatttcaaggcatccttcccacccgttcgtttttagctcggctgccgaacttcattgcacagttgaggtaagaacgttgcattacaaccacgttttaacaggtgaatcccttggaagttagtcagtgctccgtgtccgcggggttctgcatctgcgcatccaccccacggcgggaaaaagaaaagcggccggctgcgcgcgcactgaaggtgcagctgctttcccttgtcattcgcagaaccacgaggtactgccagggtttccgcagtgcctgcgtcctcgtgggtgttacaggccctccagagtgacgctgggcgcaggaggccgcgcgcgcatcccacgacctcttccaggggggcctggagcagccctccgccccaccgagagccagctgtgcttcccgccgcgcgtcctgaggtcacactcctgccctttgccgaacgcacctgcgcccgcggagcgcggggtgggcttagaagggcccccaaccgcttttcttccgggaaccacgcagcgggacgcgggctccggactccctgggggcagccttgctgtgggtgagcaagcgcggaggccgagcttcttgcaaacggactccaaggggcaacgaccttcgcgcgtcaccaaagtgactgcgtgggtgcccacgagcccggctcccgcaacccacgggcggccactgcgcaggcgcctctcgtggctggcggccccgccccgccccgcccggctgctccatggcgctgtgcgaggccgcgggctgcgggagtgccctgctctggcctcgcttgttgctcttcggggactccatcacccaggtacggccgccccgacgctcggcctcccgccccggcctccctgcggggtcgctgccgagcaggccgaggctcctcgccgtcctcttcggcgcccgagacggctgggccggaggcctggccacgcccgtggagacaccggaggagtggcgggtcccccagtggctgcgccttccgggcccgcggcgtcccggaggtcacgacggcgtccgcgagagcccgggctccaggcacagacgcgaggggacccggccgcgctgcccgccccgcgccgcctcccacccgggtcgagatgcgcggtcttcccctcagcgccctcctgggcagcggcctttcccctccgggtccgggttagcggccgcgggcgaccgcgcgctgtgtcccaggaggccccgcggccagctccgggcagaggcgccaggagctctctcgccccattccctgcgggcacaggtggggccgttaggggttgaccttggaagtaaaacgccttcaggaattaggtagaaaaggaccatccgttcatccaagatcatctcacctcccatgaagggaacggtcttctaaatgcaggttcttacttcggggagggagtagaaattccattcctgtgtgtgtcctcttctcagacaggacttgcttcaccaggcttttgtgtatacgccagtaactggtaacattatgtttaggcatatggggcagtcagagctgccgaattccatgggaatgtgtatgaaaaagtgttcaccctcagctcggtaaccagcaaagcagtgaggcggtgtggccttcatttcctcactgacctttgactttatttcctgaacttagatttctgtttagcttttttttttttttctttttttctttttttgagacggagtctcgctctgtcgcccagactggagtgcagtagcgcgatctcggctcactgcaagctccgcctcccggattcaagcgtttctcctgcctcagcctcccgagtagctgggattatagacgtgcgccaccacaccgggctaatttttgtaattttagtagagacggggtttcgccatgttgaccaggctggtctcgaactcgagacctcatgtgatccgcccgccttggcctcccaaagtgctgggaatacaggctgtttagcttttgatagagaaaaatccccctctgctaaagtgctgccaggtgtacttacctgtaatccccaaaatgacctcctggagtgaagcaatcaaagccaagaagggagcgccgagaaaacagaagttgccaatcagaactgccctcgctgagatgcccggttacagtcattagtagtaataatgggcttttcttcctccagttttccttccagcagggtggatggggagcatcgctggctgacaggctggtcaggtgagaatggtttccgatacttgagttcttatggatggaaaatgtcttagggatccgtcttatggatgaaggatagttctgaacagaacattcctcctttattaattttgcttgcctcccctaatcagtatataggagaaggaacagaaaacatttactcttcactcagtctgaccaattagatattttagggttgagcactgatggctgggtagactcagacaaatcaaggaaatggccaaggcctcttccctagtcaggggcagacagatccaagtccagctgctatgactgcagaacttgcagtttcactgctacaccacactggtaggaagctactttgcctttttttgaagtgctgccatgacttaagactcaccttgtcacaattctaccgcactttgttttggtttttggtggtttttgttttgcgacagggtctcttgttaggcgcgtccacgtgaagagaccaccaaacaggctttgtgtgagcaacaaggctgtttattcacttgggtgcaagtgggctgagtctgaaaagagcaaagggagatgggtagggcagtactataggatttgggtaggtagtggaaaattacagttaaaggtggttatctattgttagcaggggaagggggtcacaaggtgctctgtggggagctcctgagactcattgtccaggggaggaatgccacaaggtcgattgattagttagggtggggcaggaacaaatcacaatggtggaatgtcatcagttaaggcaggaactggctgtttcactccttttgtggttcttcagttgctccaggccacctggatgtatacgtgcaggtaacaggttatgacggcttagcttgggctcagaggcctgacaactctgtcacacaggcttgagtgcagcagtgtgatcagggctcactgcagcctccacctctggggctgaaggcatcatcacctcagcctcctgagtagctgggaccaacaggcactcgctaccacacccagcccagcacttcattaaagtattgtgatttcactctgtaaaatggctagtcgcattttataatcattacacacacaaacaatctcttagaaataaggctgagtttcggtggtggttctgcagtttataaatgccacctgagaactttgagcagtgtcagaaagtgtccccttgtgctgctttggagccgctgcctgacgctgtggcctgcagttctccgcgggtgccccagcttctctgcttggttatgcatgtatgggaatgtgaatacagcaaaatgaaccatattgatttactaatcataagttgaaccccaggcgtcattttaagaaaactttatggacaactttaaatatctacagaagcaaagagtgaaatgagcccatccatccctcctatggattattctgaagcaaatcccaaatcatatcattttaccaagactaagaaaaaaagagtccctcttatgtgactggtattctctgaggggtttcaaacctactgcctgatgcgaatccttaactgggattctcctcactttacatgtgaggaaggagcacagcgtgcccagggtcacgcctagtcacacagggagccgagaaacaaatccaggcaacccggcttttttttttttttcccccattacacctacagtactgtgaatccaactgtttttaagaaggaaacaaaaagtattaaccggtttaagttgaaacacaacgaatgtatttactaaaactatttaatcaaaaccagaaatctcaaatattctatagactgtttaaatataaaccaaactaaactatttaagttccaggatattagtgactttttacctgagatacttgctcagattatctatctgttgtgaactccattttaaaagcacctcactataccatgcttgaagtcaggtagtctgtagacttcatcacagcccctttatatataattacttctctcacggaggagtatggtgtatttacctgtatctttgaatggcttaagattagcatgcttcagctatgttcttgctcctatcaaagtgaaacctgggggtggctcagagacacgtgacgggtttagaatcccagagagcacaccctcactaaaggccggttactgcgaccataaacacttcttgcccacaattcatctttttaaaatttttcgtttcagaaaatgtgatgttctgaatcgtggattttcaggttacaataccaggtgggccaaaattatccttccaagattaatcaggaaaggaaacagtttggacatcccagtagcagttacaattttctttggggccaatgacagtgcactaaaaggtaaaagcatttttgatgttcttctagctcacttttaatcatttttatgttacagcaaacttgcatttaatatacttttttcaactgtttactttctcccaatagatacagttttgccaaacttatgttgtttatatgtattcctggctttaacactggtggattttattcttgactcagtttctacataccttggttgctggcagtcctaatcttgcaaacagttaaatattttctagagtctgttagtgctatgctaagtttgtaatgtgttctctttagttgatgcatttggcagcagaaagcttaaggataccttgtggcttgcatcacactgatggcagctggtggcgtgtcttagggagggatatgtcagggcagcagccaccctgacctcagttaggcttgaatcctgggcaatggtgaacgtgggtttggaaaaggagatggtctctccttgactgctgaagaattgctgctgtgactagaggaaagctagccatgtaagaggcctttcttccccttctactcttgaaaaaagccttctgcgtgctatcgacgagaaaaatcagcctttgttttgggaagttaggtagtcaccttccagagatttcttttgttaccctacttgtgtcacagaagtgctgtggtctgctattcacgggcacaccgtaggagacctctgagttgaggctggacatgaaggaacaccaactgcagtaagaggaattcttgctctctaggagaaagattacgtagatgacaggtatcggtggagactgcacactaaccattatatttgggaagaaattaatcttcactttctatcttgtaccaaaaaccataagaaaactcaaaacagaattttttaaaaagataaatttttatcaaatttagcataaggaaaaaacacttcctaagtataagagcagtggaggaagccacagaggaaaaacaggtttatgaaataaaataggctgcgaaaaaactgaagaagaaaatgatgtgttaaggaaaatatctgcaaaatgtggcagacaagagagtaatgtctttagtgtagaaatcaataagaaaaataccaactccaatagaaaatgtaggcaaaggacaggaatagataaaaggcgaaatttaacagcaaatacatatttgaaaatgtgtgaaaacttatcaaaaaatgccaattaaaacaaggtattttgattttttgactcagaaaagcaatatgaagcagtaatacttacagctgacacgcatgaaataagattggaactcttacattcctggtgagagaatagcttgtgatcctctggaaagctgtgtggcaatatgcgccaagggacggcccacgtgtagaaattcaacctaaggaaatattcagatacgcagccagatgtgtgtgcggagatttctgtgtattgctttttttttttttttttttttttttttttttttttgacagtttcacactcttgcctaggctggaatgaagtgatacggtctcggctcactgtaacctccacctcccaggttcaaatgattctcctgcttcagcctcccgagtagctgggattataggcgctcgccaccacgcctggctaatttttgtatttttagtagagacagggtttccccatgttggtcaggctggtcttgaactcctgacctcaggtgatccacctgcctcggcctcccaaagtgctaggatttcaggcatgagcaaccgcacctggccgtgtattgctatttatatataacagtagattacaagctgtacagtacggaaacatcatgtggtcaccctacaactaaatttcatttttttgcaaactatttatggacacagaaaagctcataatatgttatgtgagccaggcgtggtggctcatgcctgtaatcccaacactggaggccaggccaggagtttgagaccagcctgggcaacagagtgagactctgtctcaataacaacaaagtttgcctagtgtggtgttgcgtgcctgtagtcccagtacttaggaagctgaggtgtgggagggtcgcttggccccaggagttcaaggttacagtgagctgtgatcacactacactccagcctaggtgatggagcgagaacctgtctctaaaacaatttgtagagaaaagcaaaatatgaagtcttcagtgtgaatataatcttcagtgcaaactcatttttttaaaagtgtatgtatcttcatgaaaagaccggaaagatatacatccaaatgccaacagtggttttctgggtggtaggaacattggtgacttttttcctttatactgtacttacatgtggttagcaaatggtaaacaatgacccttgtaatacttcagtgagagcctatctagaaaatactcctttgcaataatagtagtattcgtgggtgccatttgtttagactgagtgcttgctttgtgaaggcacactgctctcagtgctgtaaactcttagctgttttgattttcagtcctaggagggagaccttattatcttcattttcccaatgaggtacagaaagtctaagtatttatctgcggttctgtggcgaggagtgacaaagccaggatttgaacctaggccgtctcacccaacagggtgggctctttaatttctttacaaattcaacctaattgatgtaataaccatctggatactagtgacgaaaagacaagagtacttacggtgcccctagttagagcctttgaagtcttgttttatgaagaactatacattttaattcataaggagaaaaccttctctttgtgtccttggtgttaaacaatccccccagtgacatcatgaataacaggcatttgcagaagtgtgttcacctgaattgtcacttataataaatatgcatctggtgaggactcatgtttctcttgagcagatgagaatcccaagcagcacattcccctggaggagtacgctgcgaacctaaagagcatggtgcagtacctgaagtccgtggacatccctgagaatcgagtcattctcatcacgccgaccccactttgtgaaacagcctgggaagaacagtgcatcatacaaggtaaacaaaccacagccaatctcggcaaatctggataggaatgctgagggaggaactctgataggacagtggtttcctgcctggggcttctgtttcttaggggctcggtatgtccatttcagtctgttttcaatccaaaattattaaattatagcttccattatgttatacctgagaccttttttgacctagaaaagggattctggctttggatagtcaggagggaaccgcgggcctggcatctgctgacctttacagttaccagactccagggtgcacatgaaggccactgagatctgtgtagagctgtggtgctcggcctgcgggggctgatgctgatgtgccttgacttggaagtccacacctggggctttttactggtccacagaagctgggggtaggaatgatcagataggagtcgccagcactccatatacttgggtttcacatccctcaagtgctgtgttttcaatccacctttgactgaaaaacctctgcacataagtggaccttcacggttcaaacctgtgttgttcaagggtcagctgtatgttaatgttgaaaatgtgcattatggaagttctcttttttttttttttttggagatagagtctggctctgtcagccaggctggagtgcagtggcacgatctcggctcactgcaacctttgcctcctgggctcaagcaattctgcctcagcctcctgagtagctgggattatgggtgtgcaccaccacgcccggctaatttttgcatttttagtagagacgggtttcaccatgttggccaggctggtctcgaactcctgacctcaggtaatctgcccgactcagcctcccaaagtgctgggattacaggcgtgagccaccgttcctggactggaagttttctaagctgcccagaactcaacattctaggacaaatgactggctttgcaacacagaacagctatttctcaaagtgtggtctgactctgagttaactgggatttttaggtagatttctggacccattttcagcactccagatgtttcttacacacaccacagcacacataccacaacttcatggaaggctgttattgtccctactttaccagtggagaaatggagtcttagagaggctaagtaaccggcccaagatcacacagccagcaacacaaccaggaatcaaatccagcaagtgtgacttcacagctcaagtccttactgttgtatgagtttactgttgagtggggttgtagctatgtcccttgctctcaaagggcctgtcatccttagagaaggatccaatgcgttctcaagtcacaaacagcatatgccaaggggtgccacacaccggaggcacagacaaacggggagaaaccccagcctgcgggacgtggtgacagtaggttctgggcatcacatcagggcagaggggccctattgctgtgcatgagacaccagagtgttctgcagggaaggggaggtgtttaaggcccacaaagctcccctggagacaacttcagagccccagcttgcttctgggcctgcagccctaactgctttggggggcagtgtcatcttggctttaacaaaaggggaaaaatgttacatagcatggtccacagaagctgtttagacttctttttgtctactgtttcccaggaaaataatatatatgaaattctgaatgtttaatttcatttcccctttctagccttgaatgtagcccaatgcagactttttaaaaggtcagtgatgggcaaagcaggtagaggaggggtcacatctcaataactggtcccctagaaattcagcaggttattttttgagatggtcttgctgtgtcacccaggctgtgtagggcagtggattactcatagctcactgcagcctccacctctgggctcaggtgatcttcttgcctcagcctcccaagtagctggaaccacaggcatgtgcaaccatgctcagctaattttttaaatttttttgtagggatggggtagctagttataatctaggtgaattttataaacaattgatcccaagtatgaatcaaagctggtgaatagtttcttcgctgtgatgtagagcctgggccagcataggtcctcctgtggcccgcatccagttgcccatatcctcatgctttctctttaataccattctgtagtccgcctctcgccagccctcactgtcctgtttgcagcctcctgagccttctcccctagccccagccccaccttccaaaccaacctagcacaatccccagatactgcactccagccttccctggtgcagctccctgggaggatgaggcagcctgcacttgtgttagatacactcaatcgttctgtgctagctgctttgctggtgtttagtctcttaatcctgccaatattcctgcaactaggtaggcactgtcatcataagaatgcagaaagcttcaggacggttaagctgttcaggcacaccgctatttagtgaaaattgtaggcatcaaaacgaaggtctctttgtctaaagccgacaaatgattttgctgtgttgcggtccagctgttacatgtaagaagccagcggtgtcagcgcagcgttcagcttccatggcctggcatttcctactagtgcagcccttaccagcccccagcccagctcctgcagccggcactctccaagcagcccagccctcctgggcctttcctgcctctctgcctctgttcaaggtgtcctctagaacatcctccctggcgcctcagaagattccggttaccactgaaggctccttcttcccactgcaccttgtcctctgctgggtagagcagcacaccagtaacctgcaaggctcatcaacatataccctaaaccccggggctggcccaagtggggtcaatatttaatggcattttgaaactgtctagatgagtggagcagaacttacacaagggccagcacttgggtttaccaactgccacctctatttcttctcttcaataggttgcaaactaaatcgcctgaactctgttgttggtgaatatgccaatgcgtgtttacaagtggcccaagactgtgggactgacgtacttgacctgtggaccctgatgcaggacagccaggtacggtggcttgctcggtcctctcggggtaaataggatcacacagaagtaaaccaggtgtgtgtgcagcagctttccctagaaaggccctgcttagctaagacagtcatccctttagccaatgaaaacaaacaggcttgggggaggggaggaatggaggttccaggatggctcacaagcccagcagcttaattcagccaggctccttggctaggagttagtgcgcagtgacatcaatgagcaacacatggctcatatttatgaacgtccaggccaagttcttctttcatacagagaatggcagaaagctaaaacttgttaataggtaaaacaatgaatttaaatacagtattggctaataaaactgtttgagatatgtagttctaattaagttactttgttttaaagcctgaaagcacaaatataaaaggtaaaaagcaggtcccatggaatggtgcactgactcaggagacagctggtttctgacgcagtcacacatacacttagggaggacctggcagtccactcctgggttatctgccctagagaaatgaaaactatgttcacacagaacctgggtgtaactgttgacagcagcattattcctacctgctggaaacacgccagtgtccttctgtgatgaatagggaaactggtgtgtccgtggaatgggatactactcggcaataaagaggaggaactgacaagcgcagcaacgtgggtgactctcgaggcgcttcactgagggaaggaagctggtctctgaaggctacttactacatgagtccatctgttttggtgtctcaaaaaggcaagacttgggctgggtgtggtggctcacacctgtaatcccatcactttgggaggccaaggcaggtggatcacctgagttcaggagttcaagaccagcctggccaacatggcgaaaccctgtctctactaaaaatacaaaaattagctgggcatggtggagcgcgcctgtaatcccagctacccaggaggctgaggtgtgagaatcgcttgaacccgggaggcagaggtcacaccactgcactccggtctggaggatacagggagactgtctcaccctccccagcccaccccccaaaaaaaggcaagactgcagtaacagaacaggtccatggtggccagaggttagggcaaggaaaggtatggctaaattcaggttccacacagatactggtgaagaggggcagacaggcactggtcttttttaatttttctgtgaccttgtgctactcttttgtaaagagcttgttcagtagggcacattaaaggctacttcattgctatgctgggatccagagagaaagcttggacgggactgatgatatttgaagtactcaagggaaggaaggatccagtgtgcgggaagctctttggacaaacgggaagactcacagcctcaccggtttcctctattcctagctgttaggtttaggctacttggacaaagcaacatagaaaacagccaagaaactaacccaagtgccaactttttcctctcccctaaatattaatccataccaatcgttccaatgacctacacatttattatccatctgtaatagggaaaatggtcaccagtgggaaagtcatactaccacgtggatgccgagtcaccagtcacctttggaggccctgagagcctaagcagatctggaccctaggcctctagtcttcctctgaaaccctggagtactggaaccttccagaattccagattaggaggggccttggcagcttgagtgccaaaagggtcgacatctagagttctgttgtctaggaaaggaaactgcaaactattgggctagttttgctcacatgtctttttcaatttaatacaaaactgagagggtcgtccttagagatcatctcatctcaaactgcctagatgagaaaaccaaggccgaagaagaagtgctactattatatgatagcatctaaatttctggtctattaaaagtcacataaggccgggcgcggtggctcatgcctatcatcccaacatttcgggaggctgaggcaggtggatcacctgaggtcaggagttcgagaccagcctggccaacatgttgaaaccccatctctacttaaaaatacaaaaattagccaggcgtggtggcagtcacctgtaatcccagctacttgggaggctgaggcaggagaatcacctgaacccgggaggcagaggttgaattaggccgagactgtgccatcgttctctagcctgggcaacaagagtgagactctagctcaaaaaaaaaaaaaaaagtcacataagctagttggccacccagattctaacagagctcttggctagtgagattcttccccaagaaagaaatggctgtatgggtaaaattcttatagttcagggcctggtatggctgctcatgcctgtgatcccaatactttgtgaggccaaggtgggagtattgcttgagcctaggagttcaaaaccagcctgggcaacataatgagagacccatctctacaaaaagcacaaaaattagccaggtagccaggtatggtggcacgtgcctgtagtcccagctgctcagggggctgaggttagaaagatcgcttgagcccaggaggttgaggctgcagtgagccatgatcatgtcactgcactccagcctgggcagcaaagcaagaccctgtctccaaaaatatgtgtatctttttaaatatgtactcttgagttcagggcaatgggagggagactggactcctgtgtcccagcaattactgttctaggttagatggtagaagttctttctgcctaaaaacctgcctagagtcaaaaacaatattgactcatggggcccctgaacactcctaataccaaatttttcatttttgctgattacgttaataggccatatttacctgttaaggttctttcaaataacctgagaatcatgtcatatgattcagaagacctggaatgaggtcccagctcacttaatggtgagtgactttcatgaaactcaattctataatatggagacagcactatagcactagtcagggttctctgtgtgttcaaacacctacgtaaatagcacatcagtgctactgtagtccaagacacctctggtcagatgcctacaatgaaaggggctggtgatatttctgtcgcagggccacaaatgagagaatggtacacactggcatttagaaaagttataccctccctccccggcctttttgtgtgtgtgtgtgtgtgtgtgtgtgtgtgtgtgtgtgtgtgtgtgcgcgcgcgcgcgcgcgctgtggggggagacagtctatcacccaggctggaactcagtggtgcaatgatacctcactgtagcctccaactcctgggcttaagtgatcctcccatcttcgcctcccaagtaggtgggaatacaggtgtttgccaccacacccagctaatttttgtatttttaaaattttttgtagagacagggtctcaaactcctgtcttccagtaatcctcggccccaaagtgttggaatgacaggggtgagctaccacacgtggccagttacccacctttaaccgatttctctcccttctaggacttctcatcttatttatcagatggactacatttgtctccaaaggggaatgaatttttgttctcgcatctctggcctttgatagagaaaaaggtctcttctctacctttgctgcttccttactggcgggatgtagcagaagcaaaacctgaattaagtctgctgggagatggagaccattagccaatcacaggagacccaaatctgcttgttatctacagaactcaaagttgtcaatacgtagaggtacgcttttttcctcaggcttaaacctttgccactgatattaataataaaagtattagatgatttttcagggaagttttatacttaggtccattgtgtttcgacagtatttattaatgcagatatcagtgctacagctataaaatataccctgagcagcttgttaattctataaatgacaaagactatgtttttaaaaagtcacaattttataaaaatggtttttcttacattcttttgagaactgtttcactcatacatacacccacacaccccactcaaccttgtatcaaattccaaaagtgtaactaaagtataagaatatcatgactagttaaaagatagcaaataccataaggtacaagttcaagtattagtataacaagtatctgagtaacaaatgtccttggaaatggggggtaggaggagatatgattagtcacaggtttggttaactgccctcaaaatttacaagttaaaatgttttggctggtgagcacatttcagttcttaggggaaaaaaagcttttaatggcaatttatagaaatcagaatccaggctaatgatttttatccttcacacagtaaatgcagcccatccagaatcctggagcaataaagtaagaagtaattcaaatatctgcttgtgggtcaataaaaagggtttctgaagtatcaagtcttgtggggacagcccccaaccctaagggcaggtagtattctatctcctggctggctcatcacattcaaaacaacctgttttttttgttgttgttgttgttaagaaatatctcaccctcttattcaatagtgtttgaaaacaggcaatctttgtattttaaatattctaggtttgtagatagtgaattttttttttttttttttttttttgaggcagagtctcactctgtcacccaggctggagtgtagtggcgcaacctcagcctctccaagtgctgggattacaggcatgagccaccactcccagccaatagtgaattttctaagagcatgtatccctatcagtaacagggatacatgaagatacttataaaatacagaaaaactgcccagcaaatcagggccctaaacagttggtagattccataaattcaactggctaccatgtatagccctcactgtaaggtaggtggttaggtttctagagagcattagtcttagaattatgaagagccatattaacccaaatgatttctaaatttagatatatattttccctgctacataaaaactctgggtaataactagaaatagacccacaatttagagacaatgtatactagatttatctcctttgtttttagttgaaggcaaaaaaaaaaaaaaaaaaaaaaaactattccagttgtcatcacaaataaatgccaaatgcctcatattcagcggttcattacagtgtataaaaaaaaactgatcatttccctagtcagtgctgttatcaatataaaagattaatttacaaaaacgtaaatattcataacccaatccagctgtattttctgcttttgcaccacaggtcaaaagatattttaaaaactaaaacctgaaagcctcaaaataagctagattcaccttcaccttaccttttcaaaaggagaagggccaaaccacacaagaactgtttacctgcaggaagttcaaacacatgaccagcatctgctaagtcacttcccagtcttcacaaaatacaagctgtgattgatttgtaggtcaaatctataaaaatattttgcacacttaagtcagaagagctgagaactaaattagcactctgtttctttgctgtcaacacgattctgacgctgcagtttaaaggaggcagccttttcacttctggtgaccggatggtccgtgagatcctcaaatgacttggcagctgtgctgctatttgggaaggggtccttctcaaacccatcctcgtccatatgtgagtctgtgctggggtcttcctggatggtgtccattctctggtggtccagttttggagctgctggcgccgaagggatcacaggggcaggctgcaggcggcctggagtctggggcgcaggaaagggtttgataatgcgaaccgatgcagaatccatgctgctcagcatttcgacgttctgcaaagacatgggttcaattgattgataggaataaaagatgaatcggaggtcctcacagctccacccttacccatcaaacagcctcttattctgttggcactgtgatgctaagaaaaaagtgctaggtgaggctcactcaacctaagtgactaaaaaatactaggttggtgcaaaagtaattaatgccattacttttaatggcaaaaacagtaattactagctttcaagcatcctgaaaacttacttaccatttgaagacccaaaagaggattcaaacctctcaaggtaagatcccaagagagaaattgaactcaaaatattaactaagtgttgaatggctaaatcactccttatggcttgggaaggggacagcacagctctttaaatgtccatccatgcaactaatcgaagttcaccatcactgttgtcagaagggtaaacattccaacctagacccttcctgctgcaacatgaccttccatcagccagtgaaagctcttgctgggtcaggtgaaggtctttgcctaacagggcctcagaccaggcgaagattatgtttctttcatatggtatacttacactggggtgaaacagagacagagattcatactgtttatccaatttcttatcctagaaagaaacagcaagaaggtcattccctacaaatacaattcagttagtgagtactatttcatcacaggctattcctaacactaactgaagaacttagaacctgagttgtagaaagtgatagcaggctcaacagatgacaatccatttctcacccaagctttagttatgccaccagtctagaagtgtttcctttgcactcaaaggaaatacattttggcgttaagtacagaaagaggcaaggtttaagtgctatgttttctgagaaatttatccctctgtgggcaggggaataataaaggcatcttcctgtgcatgaaatgacaaatgtcccagatgctgggtacaccaggaccgcactgactggaagggcaactggtaggaagacccaggtggctgggcctgcagcattcttcgcactgccccggcccatggcctcactctcttagctgtctccacagtttctgtggaccatgctctgctggaggaactgggcctcaatccctacatcctacttctgcagaaggctaaccacatggccatctgctgccccatccctgcctgtggctgaagcataataggtgacagagggcaaggaccaagaatccaggactaggcttcctgtctgggtgccatcaatgcattctatgaccaaaaacaagccatggccctccctcctatcggaggctttgctctgaaatcaagggtcgtgccttgtccacatgtgcaacttccctgtaaacaaaataggttccatcctccaatagaagcaatcgtgatggatggcactgtcatccagagacatctgtcaaagcttcaagcacgtcaccttcagctttcttcagcacaagtgctccctagagatcttcctatacccatcatgctcaccaccctgaggaagagctgctctgtgagatggcccctaggcaggagaagccagcaggaaaggaaaggaaggaggcagtaggaaaaactcctttgtcatcagagttgtgctggaatttttaaatgctcataggaaggccactatgaaagagtttgggaaaacaagtctggaagcctgggtgtgactttctcatctctacagcagacaaatccccattccccacagatgcaagtgaatggattcgtaagaacatttatgaaaaagggcctcaaatttataaaggaccaggagttccttagtcaaagcccaattcaacttgtagctgttactgattctgaatgagaacagaaaagactgcttactcttattttttggggaagatgtaaatactctatatgacagctgggccccagtccctacatcctatttgtgcagaaggctgaagacatagccatctgctgccaataatctacatgatatatggggaacatctgaaatgccgatgtttgatatttgctctattgcaacgaagtcagcctgaaaatgctcttcaataagggctttactcatcaaaggacctggacaaatccagttaaacagtctcctatgcttaaaagtataaaattcctaagaaatttatatattaaaacaccaacacacaaaaatagtattttttttaaaagaccattagttaagctttctacaagacatgttcccctaggaataacaacaaaaaaagctattggaaatatcaggccaaactttgctaagaacaagttttaccttttccagagattacatggttggagttgatcaaaatttaaataaaacatttaattacttaaaagttgatgacttaccacacaatggacaagaatgctgaaaggaatccaaaatatcaaggagaaaaccaggacagacccaacgatgttgtctgctaaaaactttcctgtgaacaattccaaacagttaatgtcttgaccaagtacttcacaaatctaaagtgaaatgctcttaggatattaccattgtgtcaaatgccagagctgctggctagacatactaccgagagcagaatgtctgtgctgcctgtattacaccacaccatctctccataccaagtgcttttaaagaaatagccctcatatactggctgacaggaagagattgcagaatattcaacatgttacctggagtagctgtgtcaacagattaatatggaatgctactactagtaaatgcttaagaagacaaagtttttgttacctggatattatttttgtgattaaattatggactcgtgacaacatgatataccctgcttctgcaaaatatgaggctcacttttacatcaagcaggattcagtatatagcattcagtcaaataaacactcttacatcaatcaggattcagtctatagcattaaactatgcttatgctaatcacatggatatttttgggtaaagaaggaagccagtattttgactttatttcccttgtcagaaaatctgtgcatccaagctccacggggacagactatctatgagttcattttattctagccaacaaagttgtttcataactaaagctgtgaatagttccaccttctactgcagaattaaagcacatcactctgaaagcacacttttctaatgtcatcacagaaattgactcagctctcagtaagtaatctggggaaatcacctaccaaaagtattgatgctcagctggtcaatgaaatcccaaaatcgttcaattacatcctgtactcgtttctcacatttgccctatgaagaaaaaacatacatacagcatcattcccaaacacaatgtattcagaagcaatgtagctttataaaaataactgacatgtaaagggcttcattaaaatcaaacgttttcccatctttgacacaaggcaataacttccgcgtaatgagtacccaagaaagtagaacatctgtcattaacactttcataattactccatttttacaagtgatttagaattaccaggagacaaaaatcaaggaaaccagtttgctaaagatgaggcattccagtaaggactctacacatacacagtggacagtgaacaacacagccagactccctgtgaagcctcgtaaatcttaaaaccctctcccatcattctgcatgagaaaaattatgcttctctagagaacaaaagggtctggcttaagtaagtcaagcagccttctaggtctttcctactcattcagcacctgtttcaaaatcacaccctgaataattttgcaatcttagtcagttctgtaagtaatctaggaaaacataattaggacccactgcctgaaaccaaccaactttaccataaagtccccaccccagtccttctcagtctctgggctcaaagcctcccaccacagaaggaaactacaggcagggacctgaaagcactccgtcttctcctcctaagtaatacccgtagataacaatgggccagaaggatgtagccccacttgtgttttgatttgttttcatctgcaaaatcaagtacttacaaaataaaaacttcctatctggctgttacagaaaaagctgtacataaatactcacattcatgtcacaaaatcctactgtacagggctttcctttcctcaaaaataagttcttttgttcagcatcgacatagggcacacagcggccagaaaggtccctgcagcacaccttgcaggagttgtcagtttctggaacagagaacacgcattgacagctggattgttctgagacctgcctctcctcctgcctcctctttcctccctgaccatgctcccaaagaggtaagaaatcacatttattttttatttaaatagctaatactatccatagcccccaccaaggagtagtttctgaggtcacactcctcagccttcagtgacagaggccacaaggtttaaaaaaaaatgcagagaaaaatccattctagattcaagacctctcttcaaagtctaactattctctccccttcaagcccctcacaatgctcttctaaatgcttccctttgtcccaactttcttgtcaccctgctgacttcaatccttggtttttcagtctaaagtgtgcccctcagggcccacactggctccctgaaagcgagagcagctgggacacaactgtccacccttgggtggggagctcagtgaccccaggagcatgagccctgcagccaaagctccacaactcctcccaagaacagctctgacaggtcacaggataaaacaccgggcatctgtgagccatgtgggcatacataagaatggcagaaatgccagaaaattaaaccatacttaggagaaaaagaaatcaactagaacacaaaaacaagcaaaaagaaaaccttttcagaaaaggccgggagcagtggctctcgcttgtaatcccagcactttgggaggccaaggcggacagatcacttgaggccaggagttcgagaacagcctggccaacatggcaagaccccatctctactaaaaataaaaaaaattagccagatgtggtggtgcttgcctgtagtcccagctactcaggaggctgaggcacgagaatcacttgaacccgggaggcggaggctgcggtgacctgagatcgcgccactgcactccagcctgggcgagagtgagactccatctcaaaaaaaaaaaaagaaaaccttttcatcattcactaatttataaaatatttcttggacttttactgtgtcgggctctgtccttccagagcaccccaagcctcttggcattcaacacaacagatttatttggcatctgctacgtgttaccttttttttttttttttttaagaggtgaggtttcacaatgttgcccaggctggtctcaaacaactcctgagctcaagtgatccacccaccttggcctcccaaagtgctgggattatagatgtgagacactgccctcaacctatcttctttacctacacattattgaacttggaagagttcctcactccactgtatggatggtgagcttccaacccagtgattttatttaactaccgggttctttgtcttttatttattttattttttacttatttatttatttatttgaaatggagtctcgctctgttgcccaggctagagtgtagcggcgcaatctcagctcacagcaacctccgccccctgggttcaagcaattctcctgcctcagcctccctagcagctgggattacaggtgtacgctaccacacccggctaattttttttatttttagtagagacagcgttttgccatgttgaccaagctgctctcaaactcctgacctcaagtgatctgcccacctcggcctcccaaagtgatgggattacaggtgtgagtcaccacacctggctctctgtctattttgaaagcaagagaactccctcatcgactcccatggtttaagtggggtgggaagcagagtccagccagtccctgaccagtccatgaggatgccctcaaacccaggggttccaaaatagcacagaaacctaaggaaaactgacaggccagcaggagagaggctcctgccccaggctgctctaagagatcagaggggagcagacccagccttcttgataactgcaaaaatcctcatctagtggggttaggtcctggaatcagctctctctggtggagttgttgcaggagtatcctagttccatgccaatgtaatgtagatagctactgctgcttttgtggtttgtatgatatggagcagaggaaggctaggacacacctctacctacccacccactcacccccaacaaaattccctcctctcccacctcaaagcctgccatatggcctgaaactgcagcaagaagaaacaccaacaggataggtctcccaggtatggtggatctgcatgcagagatgcctgtctccagacaccaccctgcccttccccatcccctcatcctcggcttggatctcaccactgctgtcattcgcacaacctccaaatggaggaagggagcctggcagacaaaggccatgttttctcctgctgctggactgggaataaaactgctcaccattacatgcacaggactccagctgctgttccctctcgcagaaagggatgcatttcccatccttacacttgccaagatccaagcaaacagtgtcatcttcagcatttcctggaggcgggcactcactgctattacctggaagcaaacaccagtcataacaaaaagaatgagtcacaggtccaccagttctacaggtgcataatacgctgtttctcatacaagtgagcatcttaccttgcaaaagcaaaaagtgacctacagagctaggacaagagcctgcatctcaccagcaatcagcatttaaatgggagtgcctggctatgtgccaggctaggctgcatgagtccctggcctcccaagccccagttagaatgcatggtctccacttctgcatctcacagtcatatataaaagaatatcctatgtgctattacttagaataaattgcaaactttgtatgaaggcttaaaagaactccacggccttccctatctggccctgacttcatcgcacacaactctcccacagcccactgctttggctatgacaacctccattcagttccttcaatattaacagatactattccttctacctggaatgctggtgtttccactcttttggggcaattagctggcttttcttatggattaagttttgtctcaaaggttttctgagatatccctgaggatgctaagttgatgtggcctcccacttccattatgcactatcacactccttctctccttcattgcatatgttttgcaatttatatatatatatttaatgttattttctgttttccctctactagactggaaagccccatgacagcaatgatcaaatctattaagttatctccaatccctatcatattataggtatactacaaatatttcttaaataaatcaattattctttttatttttcttttgagacagggtctcagtctgtcacccaggctggaaggcaggggtgtgatcatagcttactgcagcctcaaactcctaggttccggcaatcctcctgcctcagcctcacaagtacctaggatttcaggcgtacgccaccatacctggctaattttctttctttttttttgagagacgagatctccctgtgttgaccatgctggtgtaaaactgctgggctcaagggatcctcccaccttggccttccaagtgctggaatgataggcatgagccactgtgcccaggccaataatgccaaagaaaacccaccaaagaaagttaaactgggagagacaggatggaatgagtgaatcattctggaaaatgaatagcacaagtagctaaaagtcaacacaaatagaggaggagaaaaaaaacactttatgaaagcaatggactatatatccacagctctggactggcctttcagctgaagaatgaagccaatcaaaagaattctgacttagagggtttcagagcagtaacacaaaatgtacagaaaatctggccagtttcaaacaaaagtgatggtttattaagtacccaacagataaccaggcactttgcctctggttctcataaaacctttcatgagcactgggcattcatcatgtcaacagtcatttaacaaactattactgaaagtatgatgtccagtgagctcagggaaggtttatattgtggatcattattgtatttttggtatatgatactgccctgatacattaaaaaatgctcaataaatatctgttgagcatctgttcttaaaagactaaagtcagagtattagacaggtaggaaaataattctgaaaatggtatcatctatctagcatggtccccaaagtttagcatgcatggaaatcacctgacagaaggttacacagcacagactgctggcctcccttcccacattttttgatgcagtagatccagggaggggactgacaatttccatttctaataagctcccaggtgatgctgctgctgctggttgtgaaatgctaattgctttttttctttcttcttcttttttttttttttttttgaggttgttgttctctagcttttcctgctagaaaatactgattccttatcaggaacttatcctctgctatctactattttgtataaaatatcaagggaacaaaaggctgtttgataagaacaaacgttttcaaattgttttacttacgtttatttaaaagaaagcatttttctcaatctattttattattacagtgaagatgaaacattgagcatagctagcaaatgcttctttaaagcttgatttagatattcaggttcctaacatttgtttttttggtttttttttgagatggagtcttgctctgttgcccaggctggagtgcagtggcgtgatctcggctcactgcaagctccgcctcccgggttcacgccattctcctgcctcagcctcccaagtagctgggactacaggcgcccgccaccacgcccagctaattttttgtatcttttagtagacacagggtttcaccgtgttagccaggatggtctcgatctcctgatctcgtgatctgcccacctcggcctcccaaagtgctaggattacaggtgtgagccactgtgccgggccatcaggttcctaacatttggcaaagtaatgtgatagtgacagatcccaaaagataaaaacatgggcaacatgtcatactatgcacacggaaaaccaaaatcaagccaaaataggacacaacttcattcactaggtccctgaagacctccagctttctgtttgcatccttatcacaaaacctaggatagttacaataaaaaagataacaagtgttggtgaggatatggagaagctgggaccctcatacaatgctgctgagactgtaaaatggtgtagccattttggaaaacagtctgacagctcctcaaaagattaagcatagttaccacatgacccagaaattctattcctgaataatatccaaaggaactgtccacacaaaaactcatagataaatgttcacagcagcattatttgttatagcaaaaaagtggaagcaacccaaatgtctatcaaccaatgaatgaataaacaaaatgtggcatatccatgcaatggaatttacccagcaataaaagtacatgaagtactgatacatgctacaacatacatgaaccttaaaaatgctatgttcagtgaaagaagccagtcatacaatatgtggtcacgaaaccatattgtataattccatttatatgaaatgttcaaaacagacaactccataaagaatagggtggttagtggttgctctgagttgtggggaatggggggattggaggatcatagctaaaggatacagggtttctttctggagtaatgtaaatgttctaaaattaattgtgatgactgcataaatctgaatatactaaaaatcattaaactgtacactttaaatgggcaaactacatgagtgtgaattatgtatcaataaagctattacaaaatcaaaccaaccaaccaagagagacaaattttgaaaaatataagaatgggacagatagatatatcagaggaacaaaaaaactagaatagcaaactgaatattgctttttgacaatttaagtcaaaaaacatcgcaagggtaaaaaaggaacattatatactggtaaggaacagcagataaagatgtagagatatgtccgtttatatacctagtaataacatagctttgaaatttttaaagcaacaattgaccgaacaaaagatactggacacctggaaaggttagctccagaaagattcaagtcctgaatgtaaaaggacaacttatgaagctaatagaagcagctgtggaaaatatctttttaaccatccgccatggcttttctgaaccatgtgtttaaaaaatacacacacacaacaaaatgatggatttgattacgttaaagatttctgttctgagaatggcaacagataggagacgtatgcccaaatggatgattacataagaactcctccaaattcacagtagtgaaataacatgaaacccaatttttaaaaaatgaaccaaatatatgaactggctattcacaggagaaatctgaatagctgaaaaatataaagagatgctcaagaaaaatgtaagtaagtgcattaggacaagggctgttaaaaaaaaaagtaagaacaagagattactttatactcatcatgctaataggacagcagggtaattccaagcgttggccagaacgtcaggataaggagtcctcagacacaggcaacctagcagtggtgctctagagaccagcacatcctgcctctgtgactacacaatgacactcctcagtacccagagaaacacacaggttcctgaagggacgtaggaggatgtgatctgtgtcctatctggaatatcaaggggatgaaggcaatggaagtagctaccacttggtgacttgtaagtaaaacacagccaatcatataactaaacaatatgtaggtgtccccaacagtgaaatacatatagatacatatagaaaaactggttacccttctaacttgtatcctgcttcctccacactattccagtgcatagattcatgataacattcattatcccaagattgtcattttgattgtttccaaaattttgctattaggatgtagccattaaaaaccttgttatattatctgtagcacaatatgggtaattctttaaaacatgatactgaattttttaaaagtaaatttaaggtagaatatcattttggcacattaaaaacacatacatgcacaaaataacactatatgatctttcaaggatatacacatatccaggcaaatattaaccacagtagagtggatgtctgtgaggagaaagaggagagtgatggaaatgaaagagaaatagaaacaggtcttaaacccaccaaagccaagtgtcacaaactaaggagtgccagaaactcaacccggcatatgagattaaaaataaggtgtctctcatctgaacaaaacataatcttgtttttcaaagacacacacacacttgacccacagcattccaaggaagcaacaagaacacgaacctgtgcagtaggacacgcctttgcaagtagcattaatcgcctcctggcacttcttctgggcagtctcaaactgacagtttttacagcaaggactgttcctgtcactggagaagaacagcagacaggaacagagcaattcaaattatggccccatatcaaatcaaacgctacagttacgttacagtgacctgaagatcaccggggaagacctcctggctccgtcacccactcctacatcatcagacatctccgctgctagagctacctgcacacactttgtcccttcctaatgtgcgtgaggtcacataaatgccacactataggagaaaagaatgggaacacagcaatcacctgtgaaacatcttggtgcccttggttttcattcatttaacgcattaatttaaaaaagacaagatgggctgggcgaggtggctcacacctataatcccaacccaacactttgggaggccgaggtgggtggatcacctgaggtcaggagagttcgagatgagcctggccaacatggtgaaaccccatctctactaaaaatacaaaaattagctgggcgtggtggtgcgctcctgtaatcccagctacttagaaggctgaggcaggagaatcgcctggaccccggagacagaggttgcagtgagccgagatcgcaccactgcactccagcctaggcaacaagagagaaattctgtctcaaaaaaaaaaaaaaaaaaaaaaaagatgaggcaggtggaccacgaggttaggggtttgagaccagcctggccaacatggtgaaactccgtctctactaaagatacaaaaaattagccgggcatggtgctacatgcctgtaatcccagctactcgggaggctaaggcaggagaatagcttgaacctggaaggcagaggttgcggtgagccaagatcgcgccactgcactccagcctggtcaacagggcgagactctctcaaaaaaaaaaaaaaagacaaggaaaaaaaaaaaagacaaggtggggccacaaggcaatccatagctaagacactcggcagccagaactctactccccatcagtatttacagcgttaatatgcactgtatccagttaaatctcaattattcaccagaaaactgaagtttaacccttttacttctaagccaggcactggtctatcagtgtatataaaaaatgaaaacctgggtaactttctaacttgtaacctacttcctccacactattccagtatatagaatcatgataacattcatatcccaagactgtcattttgattgtttccaaaattttgctattaggatgtagccataaaaaaaccttgttaaatcttatacccttgttaaatcttatctctgttgcccaaaagattctttgggcagccaggagcagtggctcacgcctgtaatcccaacactttgggaggctgaggcaggcagatcacgaagtcaggagttcgagaccagcctggccaacatggtgaaaccccatctctactaaaaacacaaaaattagctgggcgtggtggtgcacactgtaatcccagctactggggaggctgaggcaggggaatggcttgaacccaggaggcggaggttgcagtgagccaagatcacgccactgcactccagcctgggcgacagagcaagactccgtctcaaaaaaaaaaaaaaagaaataaaagattatttgggccaggcatggtgcctcatacctagaatctccacactttaggaggcttagaagggtggatcacttgagcccaggactttacaacaagcttgggcaacatggcaaaaccccatctctataaaaaatacaaaaaaaattagccaggtggcacacacctgtagtcctgtctatccgggaggctgaggtggaaggactgattgagcctgggaggttgaggctgcagtgagccatgatcatgccactgcactccatcttgggcaacagactgagaccctgtctcaaaaagaaaataaaggccaggcacggtggctcccctctgtaatcccagcactttgggaggccaaggtgggcagatcatgaagtcaggagatcgagaccatcctggccaacatgctaaaactccgtctctactaaaatacaaaaaatcagccaggcgtgatggtgcgtacctgtagtcccagttattggggaggctgaggcaggggaatcgcttgaacctgggaggcggagattgcagtgcgctgagatcgcgccactgcactccagcctggcaacagagcgagacgccgtctcaaaataaataaataaattaaattaaataaaaaagattattttgccaggcacggtgcctcacacctgtaatcccagcactttgggaggccaaggtggatggatcacaaggtcaggagttggagaccatcctggccaccgtagtgaaacctcgtctctactaatacaaaaaattagccgggcatggtggtgcgtgcctgtagtcccactactcaggaggctaaggcaggggaatcacttgaacccgggagacaaagattgcagtaagccaagatcgcgccactgcactccagcctggcgacagagcaagactctgtctcaggaaaaaaaaaaaaaaaaaagattcttttaactataggactgctaaaccaaggagcatgcaaggtcaaggattttgttacataatgtcacactgctttccagaaagcttcttcttttcttatttgttttttgttttttaagagatagtgtctcactatgttgcccaggctgttctcaagcatttctcccacctcagcctcccagagtgctgggatgacaggagtgagccaccgtgccaggcccagaaagcaatttcttgctgtgaagggcaaaagaggtagatgtaaacaaacacactcacacccctttcagttgattctaaagcccctgcaagttcagtcttctcttattttggacatcttgttataccaacttcccaaaatccctgtggagagactcctcacctgcactggacaccttccttcaacgtgcagtcgctgttgcagcaggtgtcgttgttcagatacatgatgccaggatcacactcttctccttcatccaccctcgagttcccacaaactttattgctgcgttcttgaaaacactcctgggccttactttcaatggtcttatagattgattgtttactgcagtttgaaaacatcttgagagaaaaaaggcaataaggacccaaaataatatcataaaaatgtattcccatgcaatgtttgtgtcttctctagagacaaactcttaatgtaaaaccaccatcagagccaccctggagttatggcaaggccaccacagtctcctccaaaggccactgatatggaactgggaacctccctccatagaatgctaaatggctgatgtgaacttggttaaggatctataattcttcttacgaaggtaagcaagctatacaaatactgagaccaaacatcccagtcaaagcccacttaaggacaagcagaatagcacaacagagagctcgtagctccatcagacttgaaatctcctcacctcaggcatgccactcatgcagtgacaagaattaagaacctctgtaggttaatgttgtcccagacaaaacaattcagaaatgcaggagaaggggtttcttctccttctttggctacttatatggatgatccaagtttaaagttgtttaaatatttgagcttagtaataggcataatagtacattttatataaattaaatccccaattgttacctaaacattttcatcaaccagcaagaccagtgtctcaaaaagtctctacactaccttcccaccctggagtacagaaccactaggataactcccttttaaggctgagggttttatcaggagctctaaaactgcggtcattttccagacctcctgaagttatcaaaaaaagaagaggcttagggaaaactgagcatagttacttcttaggtcggggtctccaaagtgctctgcagatgccaaaatggcttcactttcaccccagacaacaatcatgaagcccctgagagccaagtgtatgagaccctccaaaggtgcctgtaaccaccaaatcagacaccaaaggagctactttcagaaagatagcaaagacctcatcttacacagaaatactaactggctttttaaaaaacatcttcaaatctgtttttttttttttttttttttttttttagatggagtcttgctctgtcaccaggctggactacagaggcacaatcttggcttattgtaacctccgcctcccgggttcaagtgattcttctgcctcagcctcctgagtagctaggactacaggtgcatgccaccacgcccagctaatttttgtattttttgtagaaacagggtttcaccatgttgaccaggatggtctcgatctcttgacctcatgatctgcccacctcggtctccaaagtgctgggattacaggcgtgagccaccgcgcccggcccaaatctgtcgttacagtacagatgtctaaggggtctggttattctaatcggggcctcaggcagttgtcattttggtgggtttattcatcaacatcatgtatctctgggttccattttatcaggttaaaatggagttaaaattcacagtgaacagataagaagacctcttcactgatttgtcagagttacaactcccaagcagctggagagcactaacgataaaaggaccaacccgcaactctggctttctgcctacacatccctgaagatctggcagcttctgtttgcatccttgtcataagacttcctcttccgttcagcaaaccttcctaagaagttacaatctcaaaggtcctacattccttttcactaatgtcatctgtccacagagaagtccacctgtggcaaactgctcttcataggcttgcctagtagagggtgatgggttctgtctttctaggtcaaggaactactttatttttgtcctgtaagcccttttcatcagttaaaaatatttttattaaggaattcatttaaaacataggctgggcacagcagctcatgcctgtaatcccagcactttgagaggtcgaggcaggtggatcacctgaggtcaggagtttgttgaccagtcagttgaccaacctggccaacatggtgaaaccccatcctactaaaactacaaaaattggccaggtgtggtggcatgcacctgtaaccccagctactcaggaggctaaggcaggagaatcgcttgaacctgggaggtggaggttgcagtgagcagagatcacaccactgcactccagcctgggcgacagagtgagactccactcaaaaaatcataataaataataataaataaataaaacatagaagatgcacattatcttcttacaaggggactcctacttgggcaaccaaactagaaaaacacagactaaatatgatgtgctcaggacaaaataaataaattgttcttcattgatacagactggcagctccagaaaaaaaaagttcttcccaggccccattctcattagcaagttcttttttttctttttcctttttttgagataaagtctcactctgtcatccaggctggagtgtagtagcacaaccttggctcactgccgccttgaactccccgggttcctcctaccttagcctcctgagtagctgggactacaagcatgtgcttctatgcccagctaatttttgtattttctgtagagatggagtttcacatgttgtccaggctgatcctgaactcctaggctcaagtgatctgcccacctcggcctctcaaagtgctgggattacaggtgtgagccaccatgcctcactggcaagttcttacagggctgttttgaagagccccagaactggcagcaggaagagtcagcagcatgcatgtccacccaggcagtctgcaaagtaaaacattttgctcccaagttctgacactatcctcataaccaagaagcatatgacctattacttagagaaacagtatgcaatatggtagccaccaaccatatgtggctacttaaattttgttcctagtcacatattttacagtttctattacagaaatattcaagcatctatgaagtagacaggatggtatcatgaatgcccccgtgcccctcaccagcttcaacaataatcaacttatgacttcacagctcctctacatccgcgctacttttcctctgctcccacactgctgtttttgtttgttggcttattaacaactttattaagacatatttcacatatcacaaaattgatccatttcaagtatataactcagtgatttctaataactttaccaagtgttgaaaccattgctataagtcaattttaggacatttccatccttccagtaatctcactcatgtccttttacagttaatgcccattcccgtctcccatcacaggcaaacattattaaaaatttaaataaaatagaatttacaattcagttcctcagtttctagccacatttcaattgctccactgggctagtggctactatactgggcagagcagacacaaaacatcccccgccccgcagcagaaagttctattgggcagcactgaactatagtgaacatgattagaaatgcagagactatgaaaagagaaggaaaattcaacagtttgacaggttggaagagtagacaaaaaggggtagaaaaatgtttctctggcacaagttgtcaagcagaggaaaaataaaacataacatgcaaagtaacagaggaactgtttacacataacagccaaagaaaatgagatgcagaaaatatacataaaaagccaaaaaaaaatgagatgcaacaatcaaagatcacaaaaagaacaggaggcagaaatttcagaaagcagggtgtcagagccagggaaaagcagaagtaatcttgccctctgtgtccagggaaggcttgcacattagcccacagccaagctcaaaataggagtcaggacaaatacttcacaatcttttgtgattagaatcagactcctttaagctctccccaccgaccctctttaactcagcagtgcaactattgttttcctcacactgctttatgctgtttaacttcaaataaaatgaaagaaccagatatttattaacacaacttttagttcagactctaagagttagtcacggcactcttaaagtctctgaaagtgttttacagtatcacaaatcaactagtattctctatcagaaacccccaatagtaaatgattccattaattattcaacaaatatttgttacatgccagatactcctactaggcactggagatagagctatgaataagatagagctatgaataagacagacaaggaagggcctttctcccatgaggcttgtagtcaggcaaactatgtgtttaactgcaaaagttaataaaaacgtgtaaactgtacatgtaaattgtagagttaaaatgaatgacaacttgtaaatgaaatgacaaatttttaacataaagcctgagcccaccagaccctgaaatccagaactccaaaaaaagccattattattagtaatttttcctagagctcaaatctacaccattaagcttgacaacaaagtccaaatgatagttttaaccagatttagatgaaccgtgcttcaccccaaaacacacaaccacgtttcaaggtactttgtaatttgcacatccatccctagggaaacgcctaggaatggaatacgtttctgagctctcattatgatcattatacacagcctctttccaaaccacataaaaaattctcgacacacacataccttattgttctcgtgatcgccactcacagctatgggatacatgacatatttccctccctggtcctcattcggggcacattctgctagaccatccggatcatgttctgctccaaaattatgtcccaattcatgagttgtaaccaggtcagcttccttaaggatcatgcaaagaaaacattatttctcaatatccagccatcacctacttctgccagttgggcctatgctgtcttaaatagagccttataatcagatcaacaagagaataagaactgcatgcttataataccagcactttaggaggctgagatgggaggattactttactctaggagtttgaggccagcctgggtaacacagggagaccctatctctacaaaaataataaaaaatattaaccaggtgggctaggcatggtggctcacgcctgtaatcccagcactttgggaggctgaggcaggtggatcacgaggtcaggagttcgagaccagcctggccaacatggtgaaaccctgtctctactaaaaatacaaaaattagctgggcatggaggcacgcgcctgtaatctcaactactcgggaggctgaggcaggagaactgcttgaacccagggggcggaggttgcagtgagctgagatcacgccattgcactccagcctgggagacagggcgagacttcgtctcaaaaaaaaaaaaaaaaaaattagccaggcatggtggtgcacacctgtggtcccagctacttgggaggctgaggtgagagtatcacctgaacccaggaggctgaggctacagtgatctatgatcacaccactgcactccagcctgggtgacagagtaagactttgtctcaaaaaagagtaataaccggactatgattcttctaccaattatatgaatttaacagaataagtaggattttatttaatactatcaaacattattgtaagtagtaacaaatcaatttaagaaaatgtaatttataagatatactggaacattcataacaaaacatcaaaccttggccatttcaaccacacacaatctggtgctgataaatgcaataagctaactgtagttaattgtccagcctcctcacatgcccctcggcccaatcacatgtctgttaaaacctaaagcatctcagcagaaaggaaaaaaaaagcaaggggtaaaaaaaacagtacggataggcgcagtggctcacacctgtaatcccagcactttgggaggccaaggtgggttgatcgcctgaggtcaggagttcgagaccagcctggccaacatagtaaaaccccatctctactaaaaatacaaaaaattagctgggtgtggtggcgcacgcctgtaatcccggctactcgggaggctgagacaggaaaatcacttgaacccaggaggcggaggttgcagtgagctgagatcatgccattgcactccagcctaggcaacaagagtgaaactctatcttaaaaaaaaaacaaaaaccacaactgaggaacaacaaaacaatgttttattttctcaatgactgaattcatgtccaataacaatcttaatgacctagaggacttggtttattagaatccagttgcagggctgtacttaatctatcagattatcagatgatttctatatgaataataaattttgccaataaagctaaaattttttttccatatttatctgaataaaatatcaaacttaaaggccaggcacagtggctcacgcctggaattccagcactttgggaggccaaggcagctggatcacttgaggtcaggagttccagaccagactggccaacatggtgaaaccctgtctctactaaaaatataaaacctagccaggcattgtggtgggcgcctgtaatcgcagctatttgggaggctgagccagaagaattgcttgaacccaggaggcggaggttgctgtgagccgagataggccactgaacccccagcctgggcaaaagagtgagagtctgtcttaaaataaataaataaaataaaataaaataaatatatatacatataaacttaaaattcctgagttcttttttcctaagggggggaaatcactccatagaacctgaaaaaataatattttgcaagtcatttttctatacaagaagtctttccacatgttcatattaaaaccgtagtgggaaaaaaaacttaaatttttagcaaaagcactcaaatcccaaaggtgtaatgaagagaaatatctcctaactgcttggggaaaattcattagtggatttgctaatgactcttaaaaaaaaatctcaaaaatttcaaatcaaattttgtttttttgctgtgtttttttaagaggaaagttctggaagaccaaagaaaatatgtcatgaaatcaagccattaagaagttgtgactccaaaaaagtaaaagcgtgagctactgtacacacatgtatgtttctgtccatggctcctggcttacaaccctccgtagccctggttacggtcttctgttataatgttggggtgctttagggctcaggagcaatcctcaggaaacagaatctctctctctgaccttctcctgtcctccttttacctgatccaaggcaagactctaatctgattgtgggtccagagatcctcattctcattctcattctagagagggtcctgccctttactgtggagggaggaatgctgcacagagaggtcaaggagaatctggacaggccttggtgggcttccccactcagtcggttagtatgagaacatacccattttgtccaatcacatttctacacagttgtcattcgtgcttatgtaatgaagcctccataaaatctcaaaaaacaggattcagagagcttccagagagcattttgaatacatggaggttgacaggaaggtgcaaaactcattcgtgtgccaggagggaggtacatcccaactccatggggacagaagctcctgtactcgggacccttccagacctcgccctatgtatcccttcatttggctatttctttgtatcctttcttttttttttattttttgagacaaagactccctctgttgaccagtacagtggcgcaatctcagctcactgcaatctctgcctcccaggttcaagcacttctcctgcctcagcctcccgagtggctgagattataggcatgcaccaccacacctggctaatttttgtatttttagtagagacgaggtttcaccatgttggtcaggctggtctcaaactcctgacctcaggtatctacccacctcggcctcccaaagtgctgggattacaggcgtgagccaccgcacccagcttctttgtatcctttaaaatatcctatgtaataaacccataaactaagttaagcttttccctgagttctgtgagccacttaagcaaattaatcagacccaaagaggagaatgtggaaaccccaacttgaagccagttggtcagaagttctggaggctcagacttgtaactggtggggaggagggaacagtcagtcttgtgggactgggccctcaaactgtgagatctgatactatttccgggtggagagtgtttgaattgaattggaggacacctagctgatgtctactgcttgatatgtagggggaaatccccacacgtttggtctggtcacacaagtcttctgtgttgatgatgatggttgtgatgtgagaatagagggaaaacacagtttgagagattttttcccctaaaacaaagtaccataagaaaaaaataaatttagaaattaaggccaagcacggtggctcacgcctgtaatccagcagtttgggaggccgaggcagacggatcacctgagagccagcctgaccaacatgaagaaaccccatctctactaaaaatacaaaattagctggtcgtgatggcgcatgcctgtaatcccagctgctcaggagaaagaggcaggagaattgcttgaatccgggaggcggaggttgcagtgagccaagatcacaccattgcactccagcctgggcaacaagagaaaactccatctcaaaaaaaaaaaaaagaaaagaaaaaaagaaattaaaagattcccaaaagctaattagtgtctttttcttttctcataccactctacattattgttcaacattgtccaacaatgatagactggattaagaaaatgtggcacatatacaccatggaatactatgcagccataaaaaaggatgagttcatgtccttcgtagggacatggatgaagctggaaaccatcattctcagcaaactatcgcaaggacaaaagccaaacaccgcatgttctcactcaaaggtgggaattgaacaatgagaacacttggacacaggaaggggaacatcacacaccggtgcctgtcgtggggtggggggagggggaagggggaagggatagcattaggagatatacctaatgtaaatgacgagttaatgggtgcagcacaccaacatggcacatgtatacatatgtaacaaacctgcacgttgtgcacatgtatcctagaacttaaatttaaaatataaatatatatatatatatatatatatatatatatatatatatatatatatataaataaaaagagacagggtctcaggccaggcacggtggctcacgcctgtaattccaacactttgggaggccaaggcgggcagatcacaaggtcaggagattgagaccatcctggctaacacagtgaaaccccgtctctactaaaaatacaaaaaattagccgggcgtggtggtgggggtgcctgtagtcccagctacttgggaggctgaggcaagagaatggcatgaacccaggagacagagcttgcagtgagccaagatcatgccattgcactccagcatgggagacacagcgagactccatctcaaaaaagaaaaggaggatctcgctaagttgctcaggctggaatgtagcgggtattcacagttgcatttatcacactacagcctctaactcttggcctcaagtgatcctcccgcgtagctgggactataggctcctgccaccacctgtttttaaatcacccaaagtccacagtttatgttagggtccactctttgtgctgtatattctatgtgtttcaacaaatgcataatgtcttatactgactgttgaagtatcatacagagtaattaccctgctctccacctattcatccctccctcccccagcatctagcaatcactgatcattttatagtctgcatggttttgtcttttctagaatgtcatatatttggaatcatatagtatgtagcctttcagactggcttattttacttagtagtatgcttttaaggttcctctatgtcttttcatggcttaatagctttttatttttttctcattttatggatgtgccagtttatccatttaccaactaaaggatatcttggttgcttccaagttttatcaattatgaattaagctgccataaacattcttatggctgggcgtagtggctcacacccgtaatcccagcactttgggaggctgaagcaggcggatcacctgaggtcaggagttcgagaccagcctggacaacatggtgaaaccccatctctactaaaaatacaaaaattagctgggagtggcagcgggcacctgtaatcccagctactcaggagactgaggcagaattgcttaaacctgggaggcagaggttgcagtgagccgagatggcgccattgcactccagcctgggtgacaagagtgaaactccgtctccaaaaaaaaaaaaaaaagaaaaaagaaaaagaaaagaaactgccaactgccttccaaagtggctgttccatttttgcattcccactagcaattaatgagagttcctgttgctccatagccttgttggaattgtgttgccagtgtttgggattttagccattctaataagctactagtaatagcacattgttgttgggtttcttaaagttttttatagaaataggatctcactaatgttgcccaggatgggtctcaaactcctgggctcgagcaatcctcccacctcagcctcccaagcaactgggactacaggcatgtacccctacaaccagcttcattgttaatttgcaatttcctaatgacatatgacgctgagcatcttttcatatgcttctctgctatctgtatatctttggaggtatctgttctgctcttttgtctgtttttaaattaggttgttcattttcttattgttgaattttaacagttctttatacatatggaaatttttatttatttatttatttttaattttgtagagacagggtctgaccatcttgcccaggttagtttcaaactcctgggctcaagtgattctcctgcctcggcctcccaaagtgccgaagattataggaatgagccaccatgcccggcctctttgtatatttcagatagcagtcttttctcagatgtgtcttttgcaaatgttttcccataccctacaccaagtataacatcatagtcaaaaaatcagtataccaaccagccctttaggaagccaaggtgagtggatcacttgaggtcaggggttcatgagaccagcctggccaacatggtgaaaccctgtctctaaaacaaaaatacaaaaattagccaggcgtggtgacaggtgcttgtaatcccaactactcaggaggttgaagcaggagaactgcttgaacccagaaggcagaggttacagtgagccaagatggtgccactgccctccagactgggccacagagcaagactctgtctcaaaaaaaataaaaattaaataaaaattaaaaatcagtatatcagatactaatatgtcctaccaacatctctctccccttcttccttacttaatgagccctaattttgcccaggacagcaatatactcagctaaaatagccagctttccacattccgttgaggctaagggcagccacgggacccagtgctgtccagtaacatataaacaaaagccaggatggggcctccagagaagctttttagaagggccagactaggctagccatgttctctttctcctcctttctccaacacagaagagaaccatcttaaaaccatgaggtgacatccatgaggacaaagacttcctgcttgttcttgagccactgagggtacctctgagttgctgtaccacccagaaaatgctatccctgaacttcttgttgactgagacaaataaaccccttatttaaaccactgcttatttaattttctgttatttgtagtcaaacacattttaacagacatagctggagaaaaacaagatcttaagatattccagagaaaaaaacaggtgacaaacaaagataagaactcaaaatgacttcagattctttagaagcaacatgcacagaagaccatagagaacatgagaactaagaatatactcagccaaaattatcaatcaggcttaagagtggaataaagacattttcagatatatgaaatcccaacaatatgcaggtcatctacgttttcttaggaagctcctgcaagatacactacaccaaaatgatggcactgagaaagagggagaccatggggttctgaaaataagagggtgtgggatgccttgaatgacagctgcactgcaggactaggagacagggagctctaagagttgctgcaggtcagaggggtccaggacagagggttcgagaaaagcagtggtcctcacatgtttcaaaagaaggctgacaggccatttttattttcttctttatgctttaattttcatatatcccacaaaaatacataaattttatttaggcagaaatttaaaaaacagtatatattacattttttaaaaaaatacctacataaatatataactgaggttctactacaataaactctaacactattcttttagaaataaaagaacatacctttgtaaggatggttttaccataattctttgtgctcgtcaaaccactattcaaatagatatttttcttcccaactgggctataataagctaaagtcaaaaggaaacagagataaattgcttattaaatacagaattataatataatccaatcatcttaataatcccagcagcatattcacacaagaaatggaaaaacttaccctttggacaaacacctccatggctgtttgctctgggagagccaacataagctaatccaagagttcccatatcaaaatcttggtatgtgaaaaggtgtgccaagcaaactttagatgcttcctcagctatatcaaagctaaattgctttgaaagaccaaaaaaaaaaaaaaaaaaaaaagcattcttagattaacaattacatcagactaaaagatgtaatctaaatcaactaaacattccagaacagaactatgatggcatgcagctcagcaccagcaatcacaacctcgtgcagtgctttgctctttccctaaagtgcttctccacctgcacaggtgagaggcacacactgtcatctgacaagggacacaaaagggaatagttcgggagcttgctccagctcttcagaactaactcactgctcctccgagggctgttctgaagacatacagcccaggactagagatgctccaattcgataaggggattgcagcactccaggccaaaacagatccctctcaagtatttcaaggattcaattggttttatagaaattttaatcttaaacttttttgagcttcataatatattgtcatttatataaatatacacttatagaaaagcatacatacccagttttatgttactaaaataaagattttacatccatttaaatcaacactgcaggtttgagaggattttttttttcttaatttaaaagggcttcatacattactttaaaaacctctaccataaccgtccagcgtctccaagtttaaaaaaaccttaatttggggggggggtttgatttattttgcttgagacagggtctcgctgtgtcacctaggctggaatgcagtgacgcaatcacagctcactgcagcctcgacctcccaggctcaagtgaacctcccacctcagcctcccaagaagctggtaccaaaggcgtgcctcaccatgcccggctaatttttgtattttttgtacaacatgttgcccaagctagccttgaactcctgggctcaaacaatccactgcctcatcctcagcctcccaaagtgctgggattacaggcatgaaccaccatgcctagccaaaaccctcaatgtttaaaatgctttaaatgagaggccagagagccctatatgaggaatgaagtgtggttacatggggattctgatagttccgtggtaaaaggatgaggcttctaagaatattctaggaggcttagggaagaaaactggagaggaccatctgtcaacataagtcatttttctctttggttcctcccctgccatgggctgtctggaggctcacagaaaagcagacaggcgcagtggttcagctgttctaggagtcaggagatctgtgctcaattcaacctctgccatcaccagttgtatgactaatcagacaagtcatttaatcttcctgctactggctgaattgtgccaccccacaattcaaatgttgaagtcctaaccctcaacagtaccccagaatgtgactctatctggaaacagggcccttaaggaggtaattaaggtacactgaggtcatatgggtgggccttaatccaatatggctggtgtcctgataaggagatcagaatatacacacacactgagggaaggaccatgtgagaacacagggagaagacagcatctacaccacaagtaccttggcctcagaagaaatcaaccctgctgaccccttgattttggacttccagcttccagaactgtgaaaacccaaacttctgttgtttaagtcccccagcctatgctgctttgtcatgtcagctggaataaacagtaacacttgctgagcctcctcacaaggatgctgtctcaaccaacctctcagggtgctcagcagatcaaattagacaaggtatgaatgagtaccacacaggtgctgcacattatgcttctccatctggatgaatagttataatatcctttaattctattgaagctttgaaaacttgatttcagcctcatgagaccctaaacaagaatccagatgagccacaccatacctggactagcccatgcaaactatgggataaataagtgttgttctaagctgctccacttgtgataattaaagcaacaacaagaaactaataaacttgccaacacattaaaagataaaaactatcgcttcatataaagtcattctacaccaaagtaatagcacacacaaactcaagacactggaatcacatggcagcaccctgttatacggcaagactccaaatgacataaaatgattaagttagccatctttagattaatcgccagaataaaaacacaaaaattttaaattcctgtagagaactttcagatctccaagctatatttctactctccaatacatgttcataacctgtttgataattactgccctaaaagataaattgataagcttcagagagagctgaactaagtgtgcagaactaatgaaacagtgtgcaaaaactctatatattgggtatccatgttattttctagagaagatccactgattgtctcattagatcctcaaagatattaaggttaagacgcactgctttggccgggcatggtggctcacacttgtaatcccagcactttgggaggccgaggcagacggatcatctgaggtcgggagttcaagaccagcctgaccaacatggagaaaccctgtctctactaaaaatacaaaaattagccggccgtggtggtgcatgcctataatcctagctacttgggaggctgaggcaggagaatctcttgaacctgggagatggaggttgcggtgagccaagatcacgccattgccctccagccagggcaacaagagtgaaactctgtctcaaaaaaaaaaaaaaaaaaaaaaggaagcattgctttatagcgtttttctttttcatagagtttttgttatttgttgtctatgctgctacatgggatggggttactgctggatcagctggaggagactgcttctgggtgtccatcttttctaacatgctccttcattaaaacacatacaatccacatatcagaaatgacaaagtggtgttagcaccatatccaggattctaagacctacctctagcaacatcttcacatcccaagcatccttttcttcatttgggtaactttttgccatgttgtagtgcttttcaccaggttttacctcttgtggagacttgagaatgcgaatctatacttaaagagatcatatacttagaacacttccaaaataagtcagaaggctctgaatactgcattattttatctgttcaaaaaaagaatcgttctagaaaaaaaacattttaaaaccaaaattcataaattcttcagtaccaatattcaatgtttgaaacaaacagagaagcatatggtatggaaaacatatgtcaatgaattatttataatattataaatgtactcttaaattttcatatcctccatgtttattttgaaaaaataagaacttgggttacaggagcctaaaatatttattacgactacagtcgacaactcaggaaagaataataaaatatacatctctttgtgcatcaaaggaataaaaggctaagaatagagtcttctccttatacaggcatttcagacaaattcatattaaacctgcaaagaagaaaaaaaaaagtaacaaaggctcccattagtaagtgtgagataaagaaggaaaccatgctcagctcagagtttctgtgagtctctctgcctgcctgcctgcctgcctgcctgcagagaaggcccattctggtctcctctgccactgtgtggtaagtttactggggtggactctgcagttttgatggtggctggtcaaggtcaaatctgggatagaactacttagaagcccaccatgatacacatctaaaccacaccctccaatccatccttcatcagatgtaaagaagttaatgttttaatctcctatattattcctgtttcttcgactggttccaaatgcctaaagcaaaaagaaaatttacaggttccctgaaactcaaacatgatgcagctatttataataaaacaagtgaagcagctttacatgcatgaacatgaagtactctccaacatactgtgaaatgaaaaagcaaggtgtaaaagtgtactgcatagcaccgttgtgtcaaatacagacatatacatacactatacctgcatacgacatctctagaaagatacatatgaaactagtgacatgaatgtctttggggaaaggaactggtttgacaataaacaggctgcagagacttacttttcactggcttttgtactgtgtacatgttacctattcaaataataacttaaaaagaaaatgcgtaacagtgaaagagaatgaaaagggaaaaataattctcttagttttatacaagtaatatcaaagtttaacatttataaacatggtgaatgatttttaaaaattttttcaacctctaaattctatactatataacttataaaaatatggtttactacaaaaagcttggaaaaaaatagagataacaatttatataatttacatatcaaaatgtctctctgcccaaagcaataccctttgtcagaagcctttttaattagtcctagcaatttgaaataacttttaatatgagctattattaagatgacattaatataacattactagacacactctgttaacagattacaagaaatcagaaggagatatctgagaggaaagaacctaaaggttctgtatatataaatacagccttgcaaaggtacacagtattttttagtaaattttctgactaaggattcaatggtgcatgccagagttttaactaaagacttaagcataatcggaggggggaagaaaactacagagaatataaaggccatgaattcaaagaaggaacaaagcacagcagcataaaaggctttctacctaaagcgagactaaggacagaaaacttcacaatctagaactaattaacatcaaaaatactgcacaattcatcataaaaaatcattggcatctgagaaaacttatttacaattattgttaaggacaagtttttaggttttgaatacaagtgacaaatatttacattacaaaacttaagtaatataagccatatctattgataaatacctgctctatctgtattccatagcctttaaaacctgcattatcccatgaagtgttccgatagatgtcatcaactctgtcaattagctctatctgtgtgtatttaaaaaagaaaaaagacattatgtaactctttacctctcctggcaatgcaatataaaatctatggggaaagaaaaaatctcagtttagaggccattgcaaaagtttctactttcgcaaaaactagcattgagatgttactgtatcagagtattcccaacctttggccccaaacttaaagtgctgttaccagaataaaacaatggtatagtttaacctaaatttcaggtactcaattgcacatggaaccaaaatgacaagtaacaggcttttttaaaactaccgtttcagccaataataaaaattaaatttaaaagtcaatcagtatacctgaaatacagttgacccttgaacaacagatttgaacttcaagtgtccacttacatatggatttccttgagcctctgtcaccagagacaatatgatcaactcttcctcttcctcctcagcctactcaacatgaagaccattatgatgatccacttccacttagtgaatagtaaatgtatttttctcttccttatgattttcttttttttttttcaagagacaaggtcttgctctgtcaccaggggtgcagtacagcggcacgatcatagctcactacagcctgaatttctggactcaagcaatcctctcacctcagcctcctgagtaacagaagactacaggcacacaccaccatgccgggcttttttttttttttatgattttcatcataacattttcctttctctagcttacttgattgtaagaacacagtaataatacatattttaaaaatgtgttaatcaacttattttattggtaaggcttctggtcaacagtagactattagtagttaaatttttggagaatcaaagttatacagtggccgggcatagtggctcatgcctgtaatcccagcaccttgggaggctgaggcaggaggattgcttaagcttagaagtttgagaccatcctgggaaattctccatctctactaaaaatcaaaaaacttagccaggaagggtgaacacctgttgtcccagctagaggaggctgaggtgggaagattgctttggcccgggcaatagaggctgcagcaagctatgatttcaccactgcactccggcctgggcgacagagccttaaaaaaaaaaagtcacgtgaggattttcgactgcagagggaagaaggtcagtgcttctaaccacacccccgcactgttcctgggtcaactgtattcccttctaaaaagaattc

SEQ ID NO: 22661 - DNA, 113349 bp, Homo Sapiens
aagcttttttcctctccaaatgaatatggcaatacccattctggagaactcttattctctgttgaaataacaccacttttctatatggccatctagcaataaatataaaaatggttaatttgcatacatttgacttcttgacttcttattttacttctaggaatctatattaagaaaaaagataaatatattttatatatacacatatacacacacacacatatatatacacatacatacacacacaaggatatttatcagcataatgataaccttattaacaaaaaactagtatcagctcaccagtaaatttattaaatattctattatatgtaacacaacaagtaacatataaatacatgtataaaacatatactgataagtgacaaaagcaagtttaagaacagtattaggctgttcttaatatgtatatatcatgtatgtgtatatataatatataatatgtatatatcatatatgatatatatatcatatgtatatattataatatgcatatgtatatattatataatatgtatatgtatatattatatgtgtatatatattatatatagtatatatgtgtatatatactatatataatatgtatatatgtgtatatatattatatataatatgtatatatataatacgtggctcataactgtaatcctagcactttgagaggctgagacaggaggatcacttgaggccaggagttcagaccagcctggggaacatagcaagactatgtctctgtaaaacatcttctaaaaattagctgggcatggtggcacatgcctgttgtcccagttactacagagttactaaggcaggaggattggttgagcccaggaacttgaggctgcagtgagctatgatcacgccactgcactccagcctggatgacagggcaagaccctatctctaaaaaaacaatgtataatgtaatatagttttataaaaataaattttaaagtaatactgatgtgcatgtaccatataataatgtcaaatggggtatgacttctgggagactttctctttataaatcttgtgtttatgaaacacttgagttaggaattttgtataactttgtattatattcataattagaaatgtatagatattttaaagtagatgtatatctattgacacgtaaaatgtcaacagtacaccttttaaatgaaaaaaatgcagcttaaggcaacatattcacgtttctaaaaagttacacacataccaaaggaaaaaaaaaaaatctggaaggctacaccaaaacattgtcgatggctattctgggtggtgagatttttgtgtgatttttgctttcctctttgtaactttctattttgactccctttttaaaaaaattaagaccacatactatttttataaatgaagttttcacttaaaaacttcgtcttcaattttcactagtaaacctttttaataactaaaaaggttcaacaatactgactttaattatgcttcctctccctattcactcaatagcctctaggtttacccctgcctaaagaatcagcagtagaacaggagaagtaataggactgagattatcaacaaaaagtggttggtttcagctttgctacgaaaaaaagatagaatgccataatattgataatgtcattttatattttcaactgatgatttccaaagaggttttacaactacaatcatatttggttctcaagtctatgaagatggcagggaagtataattcccccttataagataaacagtctcagttagaagaggtagagggatgtatccaggttcttgaattggggagtgacagcgttgtcctgcatagttcaatacagtagccacgagccacatgtggctattaaacttaaattaaagggaaataaaaatgcagttcctcagttgcactggccacattttaagggcccaattgccacaggtggctcgtggctactgctttggatagtacggtacagaatatttccatcatcacagaactgatgtgattcccactccaaggacattttccactcctgtggtggctttctacacccttgctttgcccacttaaagtaaaggaaaatattatttgagcatcttactctgaatggtacgagcttctgaaatactgtagaggaaaaaaaaaaaactgctgaattcataatacaaagatggctagggtagccagagagtggtgagtagtgggagaaggtacaacgaaagcctgaagggtgatagagtgaactctgagggttgcctacttagcacctattccctctcttcttccttttaataggactaagattttattttggtatctacccctacccaacatgggctttgtcccacagagttcaggaacaggcctgcaatgcaatttgggcttcgtcacacaagacaaaaagttagctgataagagtaacaccttttgaggctttggtcttaacctctgaaaggccaaacagcagaatacctacttcaacattatctcaggcattaaccaaaaagtgtatgtgtatcatgtgatcacacacaggactattaatagttatagctcatcagcataacagagtccacaatatgagccaagcacatcactctgttttactaatatgtgtagtatttctattagctttattaatatgtgtacaggtgagtatctaggtacattctgaggttaaaaaaatctaattttgtgctttgtgttttgaaatctacaatctgaaatagaaatacattcttgcaaaagtaaattacagtaataattaaataaaaagggaagcagactgataatacaaacattaacaagcacattatctaagtagactttgtggagaacattactccttttgtagacaaacatttataaaaatttaaacaatcaagacaggtcaggcacaggagtgataactgatgcctgtaatcccagcactttgggaagccgaggcaggaagactgcttgaggccaggactttgagaccagcctgggcaacatagctgcccagctaaatttttttaaacaaaaaatttaaaaattagccaggtgtagtggtctgtgcctgaagttcaagctactcgggaggctgaggtaagaggaatgcttgagcccaggagattgaggctgcagtaagctatgatcacaccactgaactccagcctggggaacagaacgagaccctgtttcaaacaaacaaacaaataagtaaataagacagaatagggagattagatgatagcacaattctcctctttatagaatttacagaatcataacattaaacaaaacaaccatttaaaaactatacctgaatttagtaatttaattccatgtagcccatgagtcttttaagaaaaatcctaatttgggaattcttcatacatggcatgaatgagttagatacagaatgtcaacgatgccaaacttttatagaatggaacatcagtaccaaaaactatcatgcaattttcaatggaacaaacatggtgaaagttacgagtgattttggaatcacaagcatatatatgctgctttgttcacatacttcagagaataattatagcccagagaaaagaaactaaatcactggccctaagcagaaagacagtggccacttgccatttttttctcagctaaagacaaactgcaggacatatcttggaactttggaactgtctcatcagggactcacaaaaatgtcccaatgggatagaatagttattactattattttgagactgagtctcactctgtcactaggctggagtgcagtggcacaatctcagctcattgcaatctccacctctggggttcaagcaattcttgtgcctcagcctcccaagtagttgggattacaggcatgccccatcacgcctggctaatttttgtatttttagtagagacagggttttgccatgtttcccaggctgatctccaactcctgggctcaagcaatccacctgcctcagcctcccaaaatgctgagattacagtcatgagccaccatgcctagccagaatagttattattaatacatgttaaaaacatggctcaaaccaaagaaagcttaatattgtcctcagcacacaacagtacctgtacagtagaataagaaccaaagattgtttatacaaaaattaattcactgctgaaaaaggcactaactgagaagccataaagtacaaatatttcctacagggtacctgctatgtacaagcttctgtcattctgtttcagagaagatgctgaaatgaatacacatgaatgaaagtgtgcagtgtgtactatgaaaaatgggcctctctccgttctagttagttaatttatttcagattaaatgagatttaagatatgactcctggaccaggaaaaatgctataaaacatatgattagggcaattgtaaaatctaaatatggactttggtacaagattattatctaccccatgtaaaatttcctgcttttcataactatgctgtggttatgtaggagaccctccttgttcttaggaaattcacatcgaagaattaggggaaaggggcaggatgtctgcaacttactctcaaatattggtaagtgagtgataaggcaaatgtcaaacaattgatgaatctgggtgaaaagtacatgggagttcctgtaacttttctgaaattttaaatcatgtcaaagtaaaacattaccaaaacattaattctttacatttccttatgaaaacaagtagttctgtggtagtcaagtctcagaatgatcaagaagactgaatgttttgtatgttacagaggccattagtgggcttgaggagttgccatactctgtccttagctctctgttgcttacactggatttaaaacggattcactccttaaagtggaaatactcttgtttctgtggggtatcagtccctgatgacttccagcttgaattactggtgccgttgctacctaaccacagtcccccgtcccacacccttcttgccatagtaggtagctgggctcattcagtgcagtagtcccatgtctcatatttgttccttaaagtacatgctttaagagaataagccacattgtaataaaggggctcctagatgaccatttcatagacactgccaagttccctaacattcttacgtacctgtgcaaagttacataaacatatattattaagtataagaagaaataaattgttagaaataaacatgtagtaagacatgtaaaactggaacacaaaatcccttaaaaattaagtgttttccatgaaaaaatgctcatcatcactggccatcagagaaatgcaaatcaaaaccactatgagatatcatctcacaccagttagaatggcaatcattaaaaagtcaggaaacaacaggtgctggagaggatgtggagaaataggaacacttttacactgttggtgggactataaactagttcaaccattgtggaagtcagtgtggccattcctcagggatctagaactagaaataccatttgacccagccatcccattactgggtatatacccaaaggactataaatcatgctgctataaagacacatgcacacgtatgtttattgcagcattattcacaatagcaaagacttggaaccaacccaaatgtccaacaatgatagactggattaagaaaatgtggcacatatacaccatggaatactatgcagccataaaaaaggatgagttcatgtcctttgtagggacatggatgaaactggaaatcatcattctcagtaaactatcgcaagaacaaaaaaccaaacaccgcatattctcacataggtgggaattgaacaatgagatcacatggacacaggaaggggaatatcacactctggggactgttgtggggtggggggagaggggagggatagcattgggagatatacctaatgctagatgacgagttagtgggtgcagcacgccagcatggcacatgtatacatatgtaactaacctgcacaatgtgcacatgtaccctaaaacttaaagtataataaaaaaaaaattaagtgttttcatcttacagctgtaaaaataagtttgaagcccaaattgtggacttttgtgtcccttctacagtttaaaacaaaacacggaaggaaatacacttcactatcatgacatgtaatccacaaattacatgtctaacccttgagcttcttttagaaactctcctcactaatttgcctgtgtttttgaatagcaagtaatatgttttcaatcatgaaaggttacagggaaatttttgtggtaaaaactggccttccactggcataaaaatcatcagtcttactgcaatcctttgggaaataactttttttttccattattgtcaagcaactttcaaaccagtttaatagctactgttcttgagatggctctttacatcctttaaaactgatgtcactcaagaccatgtaagagaaaacaatgatggtaagtttcataaaggagttatttctttacaatattttgagagagaatcaaactatgtgaagttttaaaaataacaattatccactgatacttaaatggacaattgcccatcctccaacacatcacacactcagacctgaactactgcactactctttcaccatgggtacaacaatcctatcaaagaatgcagccactttattttgaaataaaattgtatttgatattaattttttaaaagtattcttcaggaaaaaatgtctgagcagtataaaaactaagtgacttttgtaagtgctctatttacctctctttcattgtttctctataattcctctgattaaacactgctccactttgtaatatgaagtaattttgcacaggaataacacagtagagtaatgctgtctgattttctttcttctccctaactcactcttatgtaccctgttttttgtttgtttgagatacaccatataaggacataccaagttttctaaaatttaactacaagcattagtgaatttgaggggaatggagtcttatcaaggcttggattgggcttgatcaccaacttaccatgggagtcaatctctgtctcttttttctcatttatgagagaataaacctccctgtacctactttaaattttagttaagaatacttatgaaaacttttttttttcagatgaccaactgtttacttcatttctcccctgcacctaggctgccaagtactatgaaaaacaacaacaacaacaacaacaaaaactcaggttgaccaattggaaactctataaatccatggagttcaacatcaggaggacctttggcattgtctggtgatccttgtacttgtccttcaacagctcccaaatcagaaggtaaacctattcactctcacctcaagtcgatgtttctaccattccccccactctcagccaacatcttgccttctatttcacaaagcaaaataaaatccaatagacagaaacaactctgacttcctgccactttacctacatccaccctaatcctgaccaccttttttcctgagcctgaaaaagagggagccccagagctctggaacccatcctctctcacttcctcaagcatcttgttccatcaatgatcaactccaattcccacagacatgcctaagactcttcacctttaaaaacaaacaacacaatattttccaccagttctgcagcccttctatcaaatagtccatatccacctcatctactcctcagctcaatgcaacctggctaactccctaccattctaccaaggcttcccatcaccaaactcaatggtctcctccattctttgcttctgtgatctctctacagcagtggtccccaaccttttgtgcaccagggacaggttctgtggaagaccatttttccatggacccaggggggtggtttcagggtgaaactgttccacctcagatcatcaggcattagagtctcataaggagtgtgcacacgcacagttcgcaatagggtttgcactcctctgaaaatctaatgctgctcatctgtcaggaggtggagctcaggctgtaatgcttgctggcccgctgctcacctcctgatgtgcagcccagcccggttcctaacagaccaccgtaccggtcaggggcctgggggttgggacccctgatctacagcatttactactgctgttgtttccttctagaaattctctcctctgttagtttctctcgtaccattactttctagtttatttcttttattgactcttcttcccctaaaaccttcaaatgttagaactgtctgccagtggaagtagaaattgatatgaccattttgaaaaacacttgatgaaatgtaaagttttttttgttgttttttgagacagggtctcactctgtcacccaggctggtatgatctcagctcactgcaacctctgcctcccaggttccagagattctctcacctcagtctccccagtagctgggactacgggcacatgctaccacacctggctagtttttgtatattttggtagagacggggtttcaccatgttgaccaggctggtctcgaactcctgacctcaggtgatccacccacctcggcctcccaaagtgctgggattacaggcatgaccactgtgcctggccaaaatgtaaagttttacatttgtttatgtcttgtagccaagttattctacttctaggaatccataccaagaagaattgtgatcttagaaaataattctcatacagacatattaaatgcaatgttacttataatactaatatgctactatgcttgaattaatggtaaatagggtgcaaaattgtctgtagaatgtcgtctcaactatgtggcaaatacatgcatagttttttcctaacagtgactttcttggggaatgagaattgaattatgggtgaatattattatcttattgtctttatatatttctaaatttttcaatttttctacaagaatcatgtatttataaatttagataaaaaaagaaacaattttgagaaacaaaccagaggtccaaaagacctttttgtgaaagatggtatttaccttcacttctcactgtatacattctctaataaggtaatctcatatacttcaaaagcatcaaatgtcatcatatacagatgactgtaacacctatgtcctgactacacaccactctaatctgcttcaaaactgtacagtccagtacttccatctggctactagacaattccatgtgatgactcgcaagaacaatagcctcagcctgttatcttaccttctaacccacactccaaattttctttcctcttgcatctctactctttgtaaacagcaccatcgaaatcaaataccaaagccaatcaattctaccttctcaacagatatgaaaaccacgcctctgtgtctctcttcccactttctcactagtctcacttggactctttcaacaatttcctaaatgttctctctacttccagcttcagtcatgtgattatatatctccttcattaacaccacagtcttctaaaatgtaaatctgatcaagtcatttccctaattaaaatccttcaatggctccccatcaccacataataaaaaatctttagcataggatttgatgaatttattcttattctatggccaacttgccaacttcctgctcacactttagttcaaacatctcctttgaagcttccgtttacctcccagaaatagttggatgcatcctcctctgagttcctggggcatgccatccatatctccatcacagcatggattacactgctgtaattatttccatgtctgtctttccctatagacctggattacacaggggcaagggaaggattctattcatttttgtatctctaaaacctagcatatagttgatggataattaactgctaattgcttaaatgaatgatttggctcacaaacgaacaaaaagtacatgatggattaacaaattatggatctttttttccacacttctgaaccaatgctctagaatcaatatatgcaagatggcaaatttacccaataaatttgtcaataaattattgaaacaaacagtaaattcaacattaggaagcatggtatctgcttcaagttcaaacaactgtctcgcagtgatatttaaagtacgcacattttaaacttaattattagaatcttcccccaacctcttatttcctctttctcaggaatacacttgaaagtcacctttcatagctactgatttcaaatataggcaaaaattatcttagtttcctaaaaacagaatgaaaattcaaatactttttttactagcaatatcaacaacttcagcatactggaatcagtccaaactaaagaaaaataaaatctccttttcactccacggaaagtttcttttacattaattgcaagcataggcaataggtaacccttgggaattttagcttattaatcagaatcatcattaagatctaactcataagagcttacatgaaggaataaaaatggatcctggcagagtagactagtaaaaatttatgaaactctgaaaaacagatctcttccttacttagccattcagaattcctcacaaatgagtcaccttcctccaagaaaagcaaagttccacctgaaataaacctgaatgtgaaaagcttgcacatctaaaggaatcaacttcagttcttctctgggctaaagggagaaatcattggcgaagccaatggcaaacaacaaataagaaataattcttgcttcactttgggatacattatacactttatgcagtggtgacagatttaattttatttaacaagctaacatcagaattagtttgtactccctgtacacagaccaactgggccaggttaacacagtaaaaacatttatggaagtaaaaacatcccataaatgtgaaattcttgaaaggcatctgagactcaaaataaaattagaaagtgatttgagaagtaataaacacagggtaaaggttgaataggcacaataaagtccgtaactatagctacagaatacatgaattgaaagtagagagctggaagtagagtttcctggaatgagggaactggatgaatctgcacgctttaactgtggtccctatgaagatgccaacatatgatatacaaatgtgtatgtgtacatgtgtgagtgtagcttcactcacacacgcacacatcccatatttggcagttactcttgcagtctctgcaaatccacgaagtcatgacacaccttcaactaacaataaaattgttggttccatccccattggctgcaatgaggtttatgatgccatatgtaaggtcaaaggattgctacaaacctttaattgcttgctgatttttgtactgtttcctccatgatttccttgaggactccttgtggccttttttaaaaacacacttttattgaagtataacattcatacataagaatgtacacatctttagtacacgtaaccactgcctgtgccaagactgttcccggcacccccagataccctcctttagtctcctcctaattactgtcccctctctcttctccaaaaataactattatcctgacttcttacaccatagattagtgttgcttgtttttgaattctatataaatgaaagcatagagtacgtattgttttctgtctggcttcttttgctcaatgttatgattgtgagattaattcatgctgatgtatgtagctgtaattcattcacttttgttgtcatctagcattctattgtatgaatacaatttatttttccatcccactgttgatggacatttgtgttttttcttaggtttcgactcctactcctacatctaacatagtactttccccctttatttctacactgcagaagctgcaggtctagtattatttcttgcatgcctaatatcattcattcacttaaaaaaatctttggcaactattacaaatcaaaataggtctgtagaagccaaaataaatggagaggaggtcacaacagagtaaacaatacatgttgtgaaacatactcatctctggaacgcacagcacagggctctttggatgaggttgtctgaagcactaactcatggatccatgctatgatagtctgtaggactagctttcattggctgagagtatatagtcattcttattcccttgttcttcttttactctcatttttaaggcaggcatttcagaatgacagcattataatgacggtaccgaattttgcagctttaaacaaaatgtatcttagttgccatcaatcagaatgtgcatgcagatgctattcttggatgattttttttttctttttgaaatagtatagaccacacagcagctatactatggtcagtgagaccaccctgcctgggaacacaaagacttctgttgtatgagggagagatatggacaatttccacaaaaagcataggagccttcatcctcttcatgtctgctgctccagattccagcgcttcacatctcctcagacatctcatcctttgcagaagactctctgtcctctcaaatgtctttctctctctacggcctccttcccatcattacctattcacactcaactctcttggcttaaaaagtagcagaaaaacaaaaacctgtagctatggtcttctctcctttccaacacacttcttgaaagcaatatcactcagtctctagttgttcacccctactgactaacccactacaaactgttttccacctctacctctccactgagatcaccctaatgaaagtcatcaatgccctcttggatgctgtatttaatggacacctcttcatccttctcttccttggcctttctcaagtgtgcaactttgctgacccctctcttctcaacttctgtgatatcagactttcctgttttcttccaacctccatggacactcctcttcagactcctctcagggtccttattattctgactgtcccttaaatacagatctctttgaaggttcaatccttggcccttttctcacattttatgctcatttctgatcatctaaatctcagaggcatgttctatgagcactttgatctcaacatgagaagaggtactgggaaatatcctcctttttccaatattcttctcgatattctacacatacagtcatcccctccccccaagtctgtatcattgctctctattcctttccatatgtatgaagcaggggtagcagaaatgtcaagcactttgaagtcctgtcagtctggcttcaaattcaaactgcttcttaatcagttatgtgactttggcaaagccatcttctttctctgtaaacacgtgtttcatacctgtataacacctatcttgtagggttgaatagattataagagattaatgaatgaaaaccacctaacactgcacctgatgatgcctagtagctgccccaataattagtttccttcccattttccattttatggaatctaatcctgtcttcccaactgtaatgaatttaaggcagagctaatcctttaagaatcctttggccgggcacggtggctcatgcctgtaatcccagcactttgggaggacgaggtgggcaaatcaccaggtcaagagatagagaccatcctggctaacacggtgaaaccccatctctactaaaaatacaaaaaattagctgggcgtggtggcgggcacctgtagtcccagctactcaggaggctgaggcaggggaatggcgtgaacccaggaggtggagcttgcagtgagccgagatcgcaccactgcactccagcctggacgacagagcaagactccacctcaaaaaaaaaaaaaaaaaaatagactcctttaaccctatcagactggtcttctcaccgtccctgaacatgtcacaaccattcacagaggcacccctgcatggaatgctctcccttgccattcttacttcatgcatacctaagtcttattcacattccagcattcagcccaatcccttaatcaataaaggccttccttaaccaccaaagctcagactcctcagaaattttctccacatgtgaactgtagaatattgctactaatcatcaggcatttattatatgctactttcgggggttacatatcttttcattccatttatctccaattatatcattattcttggaacgaattatatgtagtcctcagtatacacagtttctagcaaaaagctttaagtaatacctgttgattggtaatgttaattgttaatttgtaataactgagagcataacatcatttaatattttcaactgttcctttaaaatatgcatttagacaactggaatcctagaatgtatgactttagaggccacatagaccaatattccagatgcacaacatctctttacaagaacctaatgagtgaacctttaactccagtttcaataagttcacatgaccagaaactcattaccttctttgggaaccatttgatgtctaagtagcagttccaaaatacaactatcaatatcaggagattaacatatgatatattgctaagatttaattcttgaaccctattcaaattctaccaaatgccccaataaatgtcccttatagcaaaagtatacagttcagcatcatgcttcacctttagttgttatgtcttgttattctcgttgcttctagaatacttcctcagtctttcttggaatttaacatttttgaaggttacaggctagttattttaaagactggccttcaatctgagcttgctaggtgtttcctctgattagattcaggttatgcatctttagcaggaatgtcacagaggaagtaatgctgtgtttttctcattgcacctgatcacatggtacatgattctgatttgtcccatttctgacattgttcattttgatcacttcattaaggtagcatctgtcaggcttctccactgtaacaataatctttttttctttggtattaattaattgaacattttgtagggagatactaagtaaatatcccattcctcatcaaacttcaaaagttatttattagtttatgtaagtatggactcatggtttccgatttcattttgatgattaaactgacccagatttagctagtgggtactcacttaagctgctttctgaatctgttttacatttttcatcattctttgaggatttccttgctttctgaaaatacaagatgcccccggctcaccttgtattaatatttactttgtgacaaccctggaattacccatttctccacaaagccctgatttctttcagtggaggatggtactaggtgtgaccattgctattatattaaggtatcactgctcccaggtcctcacaatggacagagatggggaatacataatgtatggatataggtgcatacgcattcacatctatatttactcctctgtctagctgtatattgaaaacttctgattccaatctaactacaaagggttgactgtacttttcccctttccatatttggagctctcttttatgaccatgagaaacctgactccattatcctcaacatatttacttgtttgtcaatctccctgtttatcacttatctcccactgctgtcaccaagaccatgccagcacggatgctctttttccatactcaggtcctcatgcattggccccctctttactcaacttggctccaaactctaatctgggcccctgtggctccccttcccctgggatggatgcctaccttgctgtgccccaacccaatggctttaggaccaaattcttcaggaggaagagaagaagaggaagaaaaggagcagaaagataaatctacatctcttcacttttacccactggcatgaattctgtcttttggggtctcccagaataaacataatcaattcatacgcaagtatttgaggttggtgttcatgtcctgtcttgttccttcagtcattccttaaatgacatggtttcaagtaccctcaacatattgagcattcttttctgaataaatcctattctgtctacatagcttgtaaaactgtgtagaggaggcacttttggttgcctatccaatatcctattctgcccctaaaattccttctttcctaaaaaagcctgactttgttcaggtatccactcccttccatacagccacatgctgcaggaaatgagaaatctatcatcagcgcctgactattccatcatgataaccacattcctcttaccagtggcaggtttaataatgggcatgtgaccaaatgctaactaatgtgacatgtaaggaagtcttctggggggcttcctaagcaaggagcacaacacaagcagagagctcactctccttcctcaggacattactgtgcctgggtgagatgcacagaactgttgcaacgaccttccaccagctgaggatgaaaccagcacaagaagggcaaaaccaagggaatcacagacaagtggaggcagagtccttagggactggccagaacctctcttatcattagccttcttgttgtgtgagataacatgtttcttttctgtttaagccagtttggtctggttttctttttagctgcccccaacagcattctgactgatatagagtgaagctagcaaccacacacccctccaggagaggtgtgataagctagggaacttccaagtccctgtatttcctctgacatagcccaagtcaatggtgacacataacacagactactaagacctccatctttctcacacctacaacaatgttattttgtatttgtattgttaaattgttgcccttcaatagagaactagaggtttacttcttatttacattgtaagcttttccattgtttcaactagttcaggtcttttaagtgagaataataaaggaaattgaagagttgctacttgattgcaaagcaaaagagctaggaataggacaaaaaccgaataataaacacaaagctaggagacagatttttgcccccgtagtaaatgtgccactagactagtaaaaagtcctgactttctgtgtttctaacttcatgcatctatacaacagtgaggaacctcaagattcccttccggcattaaaattctatgactcaagagacttcatcagagaattcatggctcagaatttctctggcttgaagcataaaatgaagaaaagtaaatcccctcaaatcagtgttagcccattagtcattatcaagattcacttatttcaaatcaacaaaacactgccctagggctacctactccaagaaacaactctgttatactatagggatcacgtctgggctgtattggtgtttattctttttttttttttttttggaaacggagtctcgctctgttgcccaggctggactgcagtggcgcaacctcagctcactgcaagctccgcctcccaggttcatgccattctcctgcttcagcctcccgagtagctgggactacaggcacccaccaccacacgcagctaattttttgtatttttagtagagatgggggtttcaccatgttagccaggatggtctcaatctcctgacctcatgatccacccgcctcagcctcccaaagtgctaggattacaggtgtgagccaccgcacctggcctgtatttattcttagcagaggaaatgtgtagaaaacaattgccaaatctgcaccctattcacgaatgtgacaaaaaacaaacattcagccatctcccagaccagagagattataggagctaaatgaaagaaagcccagatagttaaaaatgtgttgtcaccctgatgtaaagcccttcaattgctccccaacatacttaaattttgaatcttgggattttatgtcccaagacccttccgcaaagtgtggtccctgatgagtgctccatcttcacctgcccctactttgcctgccccactctgcccaaagactctagcctcactggatacctttcagtttcagaaactgagtctatctaaaaatatgtctcggccaggtgccacggttcacacctgtaattccaacactgggaggccaaggcaggtgtggatcacctgagctcacaagtttgagaccagcctgggcaacatggcaaaaccccgtctctacaaaaaatataaaaattagctgggcatagtggtacacgcctgtagtccccgctactcgggaggctgagataggagaatagcttgagcccaggaggtggaggttgcagtgagctgagattgtgccactgcactccagcctgggcaatagagccagaccttgtctcaataaataaataatcaataaaagttatgtctctgtcttctctctcttccctatctgattgttcccccgctccccacctctcccccaacaggcacatattccgcatccttctgatcttgcttaaagctatcttccccataaagtgccttccctgtgacacacccacatacttggacacgtcatttccatttcccctatgggggaactctgctctttctcttcatagcacttattactatttgtagttatccttttgtttgtttactggtttagtatattccccttgctggtttatcagttctatgagaacaagaaccgtgtctatctgggttgctcctgcatatccagaaaagaataaagacaacgtggctgccaccatactttcaaaggcaccttaatggcatggaaaagcatttaagataccatgctatgtgagaaaacagtttacaaaactatatgttgtataagcaggaagatgccaaagttttgaatatgtacattttttatatgtctagaaaagactgtaaaggaaataaatcaaggtattaacaaggaggttgggattatacagtttttatggataatctgaggacagaaaaatacatacattgtagctaaaactggataaccataaccatcgggtgaaaaaatggaaaacttgttgtaaggataaagaataaagtgtgattatcaacgattaaattgatttaataaccaaaacagaactaagaacactgactatttggataagttgtaatacatttgttaatatgtcagtcagctcacattacagtgatagtccatttagttttaatagaacacaactgtggagtgaaaaacgttagcctaggacagtggctccgagcctggctgcatatgagactcacctgggcactaaggaggcttaataaatcaccatctccagaagacagagtccggggaatctgcgtattttaaaagctgggtgatcatgacacaaagctggatttgggaaccccagcctagggtaaatcaagaagttgaagaagaggtttcttttcagtaagagtttcagataaaataggaacctgagaggtggagatgcaaacagtaacagattctgccaatagcagctgcctaccacaagtcaacaagcagtcataaattgcacactgtgtggaaaaatgcactcatcatgtttggtttgttcaaccacacaaacaattcaaataccaagggcagtaataagttttagagtagcaccttacctacttagaactcagtttggcctacttgcctttccagccaaacacagcaaagcaataaaaaatacctctcagcagagaagataaaaaacagacatcttaaaactcttgccctacgactgatatacccaaggtaacccctcagtcttcattacaacatattaactccttttttatacacccttctaatgagctcggctgacagccaaaacccagagaggattacctttgtaaattaagaggggaaagggaattcacggggaggcacacagaaagcaacgatagaaactgaaccatatatttttaaaagttaatttagatcaacttagtgtggaacaaaacattacaaatatgacagtaaataccaaggacatgaaaacaactttttataactacagtcatgatgatctaagtcattaagaaaaagaattaaatcacattctttatattctgcttaaggaagcaaaaatgaaaaggcacgaacatctgagtgccctctatgtgtaaagaacaataaacaacccagctattatctcatttgatataataatcttgtagtgcagaaatcagtctcattttaagactgagccattaaaggctcagagaactgaagtagattttttaagttttactgtagaaggtagccatagccatgttgaactttgaataactgaaatatttcctttgctcattattttataccatactgccacttttaaaataattttggttacaaacatttcttcctttttttttttttttttttttttttttttttttttttggtgtttgcaagaataaaagccttctggaaaaaaaatcatctaaaacagttgtttgcaagctgtttttccaatgtgatagcattttttcccaaatgacatattccttggaaccccactatgcaggagcagagctgctctgttaaaagcactagagtgccagggcctgaagccctactccacctctacctgtaatccaagactgctcctcaggcacctccatgacccaggacacgacagattacagatttttttttaaagcaccaatctaaacaagcttagtccctagatttgctgtgtaaaggcatgtcccttagaaacacttagcaaatgacacaaagctatataaaggcatcacaatgctgtgaaaagtttggtagtatggtaaaatgtagttaactggctaaggcaagcaacatcatgagactgctcaagattacagcaccactaatgtttcctgctttgttgtacggtgtctagcttcacatgtctgagttctacgaatgaaaaaaaaaaaaaaaaaaaaaaaggagagaaatgtctaccatttcacaaaggcccaaaatctattttagtggtttttccaagagcaatggtaatttcatttttcctgcattaccaaaaactggagttattacagaaaaatcagattatatacataaaatagaatacattaaaaagcatacataaaatatagtaaatgcatagttcagccaagaatcaaagatgcagaagtactatgcatttatttgtttattccgtgatagaggtgaaagtattttctccttaatgcctggaaataagccttgggagataagactttgtcttgcccttagaactttgagtgtagaggtaggacataaatataaaccgataggaaaggttgaatgcaattaaaaaaaacagttgtactcactgacatttaaactattctagacattttttgaattgtttataggtttttgtcttaataagacggaacacgggataagatggcagaaacaggttaactcaatctcattatcaaggactatccttataataaacttaaaatgacctaaatatctgtaaaacccaaagctgatatatgaccaatgatggggtttatccaaaataaatatgttgttgggtttttttcatgggatttgacttttaattgactataaaatttatcttgactttatactggacacaaagcaacagtctgagatagaaccatttgggataacccggcgttgctacagatgatcctctattgtacaagttactcaaagccgactttgtggtcagaggcgaaatttgtttgcttcattgttttagattaagccatttttttttgacaaattcatttgcttcttctgcatatgtgaaccttgtgaatatacagtaagtggtaatgggttttttcccaagacttaacaatataactgtgagagatatgaggagaggaggaataaaaggaaagctgtgtttgttccttggtgtgtttatccatctattccaggaggttcttttagaactctgaactggcctgtggctttttctgaaaaacctatgttcaggagtaaacaatctttttattaaagcagaatagctttactagagttaatgctttaatctcattaaagtgaaatccatttctatattgtgtatcaaggagcagaaatgtgggaaaataaaggcaatcccatgctgggataattgtaactagtcccatgtgggcagctgtgcctggaatacaaactgggatatcttcaggaatgaggctaggacaatgaggagcctggaaggtggacaaaatatcaagaggaactagcagatgttcttgattcccttctccatcaactgaagtcacttactggaacccttcacttaaaaaatgatctactttccaaaaccagaccattctatttcaataagaatgttgaaaaccatgattagagtcatagtctggctctctagggtctctctttttatttttcatttttttacagacaaggtatcactatattgcctaggctggagtgcagtggctattcacaggcgtgaccatagtgtcaaacccataggcttgagcaatcctcctgcctcagcctccccagtagctgggaccacaggcatgggtcattgcacctggctcctcagtaatgtcccttaaacccaaatgttagggccacagtattcaccacacacactgggtgctgtgtcttggaagttctgtaattgagcataaaataaaagaagaaaaaaaaattctctctctcttctagacccaaagataaaccagagacacaatttttaattgagcaaagttttcgtcaggtaccctcccctctctgtcatcaggacctgcctccccaagaatgaactaaccttatactacctgctgcccgtcccttcccacaagggttcagttctctatcccaggtctgccgtatccctgaacagtaacatactgtaaagttatttctcaaaaatgaaattctctattccttattctaactgatgccactgaggcatgagaaagaaattaaccagactgagcagatttacactaacatgcttgtgctgcattagaagtatttgactttctaaggggattcttatcaacctaactcaatctctagttgggagaatttggggcagcataagacaagaatgaaagaagtgcagacaatgtgggggaaaatatttttgagcaatggaagctggctagcagcacagccagcccacgcatgcttaaagtgagtggagagagaagaaaagaaggccaggatggctcaggccacagggcagggggaggaaggactgtttccaaatgaaagactatctctacttcaacaagggtctgctgacattctacctcttccatagggcattttttacctactcccaatgccattttttctttttctgaattccctcataatatagtacatacatatagacagctcttaattatattgtcatcagttctcttttctaaaaatatgatatattgattccttctctgtaggaagcccttaaaagaatggattgtcttgggaggccaaggcgggtgaatcatgaggtcaggagtttgagaccagcctggccaacatggtgaaatcccatctctactaaaaatacaaaaatgagctggatgtggtggcaggtgcctgtaatcccagctactcgggaggctgaggcaggagaattgcttgaacccaggaggcggaagttgcagtcagctgagatcacgccactgcacttcagcccaggtgatagtgtgagactgtctcaaaaaaaaaaaaaaaaagaattgtctgtgctattcatttgagctcaatcatatttcactttatattgatccatttattaaggtatctcttactcccaattaagctatccctcaaagagtaactttattaaaagtaacccccaccaaagtacccaacccagcactaagcacactgtaagaattcaagtagttggccgggtacagtgacccacgcctgtaatcccagcactttgggaggacaaagcgggcagatcacctgaggtcaggagttcgagaccagcctggccaacatggtgaaaccctgtcgctactaaaaatgcaaaaatcagctgggcatggtggcaggcgcctgtaatcccagctactcaggaggctgaggtaggagaactgcttgaacccaggagatggaggttgcagtgagccgagagatcatgccactgcactccagcctgggcgacagagcaagactccgtctcaaaaaaaaaaaaaaaaaaaaaaaaagaattcaagtagttgctagctttaataccaggagattatatgaaaaacatatagggtctatagataatgaggaaattggttatagatttaaaaaaaaaacaaaaaaaaaactctagacttaaagtctattacctagcaatagtgcctagatgttacaaaccttcacggaggctgagaacagtgacatgcagaataaaatagtttagaaatctcttaaatatgaatatatttcattttccaaagagtctaaaacgatttctagaaattaaatagtgatacctggagggaatgtgattatgagaatgcatagggtgatagttacagagtgaattgggaatagcaagggcatttttggttcacagggctggaccagggaatggagcagagacagaggggtacccactgagtatctactatgcttcagccaccaccataggtatttgacacatattttaaatgtgctataatttcacaagaacacatcatctttatagatgaaaaaactgaggctcaaagaagctaagtcacttgtccaaagtcacacaggtggtagtaaaggaacaaagacaagattaaggtccagatttgtctatttcgtgttcttgcactctctgctaggtaatctgaattccctagtttgcgccattgcaaactttcatccttgccccccaaacaaaatcaaaacaaacaaaaaagacaaaactttgtcttagtgagggaggaagaaatgacaaggaagagatgaaaatatctagctctctagcagttatggggtcagggtagggaggtgaggccattcgggaaggattcaggaagagttagcattagttgagtgagaattatataccaggcacttgctgaacatgtgatttcatctcaataaccctaaaaggcgatcattttacatataaggaaatgaggcttagggaagcctatggtaagagaagtatgctcagctgaagctgagatttgaacttggtcatttacgtctcagagcctgtgctctttccatgattccctattggaagcatacttttgattctcttttcccacaaatgctcaaaactaaagtttggaaaacattgttctattcaagagatcttggctgggttcggtggctcatgcctgtaatctcaaaactttgggaggctgaggcgggcggatcacttgagctcaggagtttgagaccagcctgaccaacatagcaaaaccccatctctactaaaaatacaaaaaaaaaaaaaaattagctgggagtggtggtacgtgcctgtaatcccagccactagggaggctgaggcatgagaatcgcttgaacctgggatgcagaggatgcagtgagccaagatcgcactaccgcactccagcctgggcaacagagcgaggccctgtctcaaaaaaaaaaagagatctagccagtaattacattgcagttgaactgaaagaagcctgcttcctacaggaaataaaactgtcatccaaatcaaggcatctaataaatgataaaggagagacatacaatgcatattttaaaatgctgttaccctctgaccccattatgaatatagttggcatttttataggccatgtcggtgaggctcatgaacaggtaatctacccagcggagctggagccactgctgacagtaaagttccccgacttagcagtggctgggcaataatacaatgacccaaaccagttccagtggcagcaccacaaatgggtactagagaattatcattaaatgaggtcactcctagagatagtgtccattttgcttagctgactcacacttaggtgagaatgtcaacgaacagctctccacatagagctaatatggagatcactaaataaacacatttctagctatatcagattcaacatttttgtctcaaagttaagcaaaaagccaaagtgtatctctttaatgtaaaagtagttcccaaataaaaaaaaaaaattagccaggcttggtggtgtgcgcctgtagtcccagctactcaggaggctgaagtaggagggttgcttgagctggggaagtcaaggctgcagtgaatcatgattgtgccattgcactccagcctgggtgacagagtgagacctcgtctaaaaaaaagaaaaaagaaaagtagatcccatcagaacctgcaatgaaatgaaccagtagcaacttctaagtgcttgattccacccacatctggctctatttgggaactaaattcagcagaagtctccagggtcaagaaatgaccctgaataaaaatagtctcggaaatctgtcacggagtaggaaaggaaaccaggcggcagggtgattcactccaaatggcagctccaaaacccaaattcccatttttgtcccaatatgaagccaatgtacaaaacaggcagagagcaaactgtccttttccaaaggccttcaaaagaggttgccaaagaatttcacatggaagccaaaaagatttagtgtgccattcacctctcctataaatctaactagagctatttctaactagagccctgaaccaatggcaggtttacatttacttgaagaccacccagggtatctatgggtttttttccctggcaagcaagagacaccctttgtcccaccaaattttccaaatgaccaaacagccacagagaaagaatacaggggtggtgtggtgagtatgtgtgtgtctgtttcctgcctttcttctaatctataactcactgccccaacacacagttaagttctattaaagtacagtattttgagaagattgtctgctaaaaaaaaaaaaaaagaaagaaaaaaaagaaataattccattggttgaagaccaatcagccaacatttgagtactcagttaattcattttaagatgtattaaacatggggaagggcaaattctgtagcatcacagaaaacgcaaaaggattaaaggtaggtttgcttcacagccactcacttgcaccttccccttccaaagccttgcattttattctgcattcatgatttacattctttttcttaaaggtggttgcccccaagcattatgaggttcaaagcaccagaaaacctggatctacctctgaacaggctatctgcctttgaggattccataggttggtgaggaatatgaatatgataaattctctgttatgaataaatgtccatgtatcctgagagcacatgagaatgtgacattgacctgttttgggggattgggaaagatttctcacatctggtcttgaaggatgagtaagagtatggcaggcagggaatgagggcagagatgaggaaaggaggacattccagggggtgaaaacagcaagagccagtggctctcagctagggataatattgcatgcatgtgagcacaaagacacccacccacacacaacccccccagggacttgtggcaatgtctagagacatttttggttgtcataaatgaaagaggagtggagttgttgacatctagtgagtagaggccagggatgcttctaaacatcctacgacacacaggacagcccctacaacaaagtctaaaatgtctaaaatgtcaatagtgacaaggctgaaaatcccaggtctaagcaaaggtacaaaagacatactgtgttagattaaaaaagagaagttgcatggagctttggcatgcacagtgcttcagatgattgcttttatggaagacaaaacccagtaagaaaagagagggtgaaaaattaaatttctgagaagccaagatatcagactgaatagatgctttattctcaaaacaggaaccaataacaaataaagttaagaaactggacctctggaagtctaacgtatatttcattgtcctataaaatggaaagcatttctgtcaaggacaccgtccgtggctcaagtccactcctgagcagtagcctgcattcttcctttcacgcacatggctgagagtgaggagtgtgcggagtaaggagcacgccgaggagcagatgcaagcagcttgccctggcaggactctcagagggagggtgcaaagctgatgttaatgctggaagaactcacgtataggaatggcccatgtaaggagaaaaggaaccaatgagctccacatccaaaaaggaagtggctacagagaaagcagaacatggtaggacagggatgttgtggttagggcttcaagtggtcatcagggttgctggcaggaactgctcctgaccatggaagcaggcaggactcatacagaggtcttacgcctgagcagagacccttggaaattggaatgaggaacttatcaccaccacctccatctccaccaaaaagtcaaaagaaatatcccccaacaagagacttctgggagggaaagaaggagccctcacaatacaagcaggttttgttataaagcaaggaatataaattgaagctccttctcagatattccagggttttgttagaacacaagcaggttttatttatttatttattttgagacggagtcttgctcagtcacccaggctggagggcaatggcgcaatctcggctcactgccagctccacctcccaggttcacgccattctcctgcctcagcctcccaagtagctgggaccacaggcacccaccaccacgcctggctaattttttttgtatttttagtagagacagagtttcacggtgttagccaggatggtctcgatctcctgacctcatgatccgcccgcctcagcctcccaaagtgctgggattacaggcgtgagccaccgcgcccggccgcaggttttgttataaagcaagaaatataagttgaagctccttctcagatatcctaactcgcagtaatccacatcactcttttactcttgccccatccagacacacatctaggtcaatttttttttttttttttgagacggagtctcgctctgtcacccaggccggactgcggactgcagtggcgcaatctcggctcactgcaagctccgcttcccgggttcacgccattctcctgcctcagcctcccgagtagctgggactacaggcgcccgccaccgcgcccggctaattttttgtatttttagtagagacagggtttcaccttgttagccaggatggtctggatctcctgacctcatgatccacctgcctcggcctcccaaagtgctgggattacaggcgtgagccaccgcgcccggcctaggtcaatttttaaaagtaaaaatggtaggagaaagttgcatcaattgtggcagttgtctaaaaatcaagctttagctccaagagggaaaaagaaggccagattaatagcaaaacaagaagataattctaaaaggacaatgccacataagcttttaaaaaaaaaagtaacaagcatttttccctctctacaaaaaaatgttgtcatgaaggaatgtactctgtacccagcattatgctaggtgctgctgttgagaaaacacagacccatgaagcacctgcagccttgagtgcttgactattacatgacttaaaggaaggaagcaggccttgcagaagagccaggtgggaagggaggacaggacattccagactggggagtaagagcaggaactacagcttgggagggcaggagtcatgaggtacaagcacacatgggaatttcactcacacatccatatataccaatggaccaaacacgctcaatttcagctatatacaaccagaaatatgtgcccaaccaccaatattccaggagacaaaaacacttcaacatcacagaacagcacctggattacgcagtggtgggtttctggtcaccttctgcaaagtgaaaggaaagagaggactgttttctgtctgggtcagaatttatagtttcagaggagggtaagggtgctaccctttgctggcactgtgtttatggctacagggaaccaactattttaatgtataagtaagtcatgaacaatcactgatctgtacaatgagaaccacagccagttctcagagtcatcaaggacacacagatgagatacatacaaatacatatacatctgtacacccaggattttgaatgatgtggagattgggtataaaggtagacctaaaaacctgggccttagccaatggccatatggagagctggtgattcctcccacctctccacaacaccaaccccttcccttccaaacaacttaacttattcactgtcacccagagtcagctttcatgccgccaacccctgctcatgctgcttaatccacctggaatgctctccagccacgagtccacctttacaaatcctacccatcctttggaactcagctcaactcctctcttcctctataaggtgttttggagtcaacctaaggtatctctctctcttctgaacttccagaacaatttctataattacttgacaaataatcacctaagctttataaggcttttatcttctctttcttttcctttctttttttcttttctctccttccttcccttccttcctctttatctgtctctgtctctctctctctctttgtgtctctgtctctctctgttttctttcttctttttcttctaagagacagggtcgtgctctattacacaggctggagtacagtggtgtgatcatagctcacggcagctttgaactcctgggctcaagcaatccttctgtctcagcctcctgatgttgttttcttgaactattctttaaatcaatagaaaattccacctttctccaggtcttcattgagatgtcacctcttcgagaggtaagcagcacatcttgtagttctttggatactcctagcttatctcctagagtaccttgcacacagtagaattaaattgcagcattcggccgggcatggtggctcacacctataatcctagtgctttgggaggccaagatgggaggattgcttgaggccaggaattcaagaacagtctgctcaacatagcaactctaagggcccatctctaaaaaatataaatataaatataaataaattgcagcattctcttctgtacacataggagttgttaggctcaccttagtaatctattttgagattcaaacttcacacttaagagacttaatgctttaaaaaaaaaagcagaaattctaagtgccttccctcaatttactttttaaaaaccacaagagttttaattctattacagaggagtagtcctacaaactaatgtagccctgttagactctatgccttcaatttcaaattctgaaaattctgcaaaagctctggctaagcccatgtatttgctggaggtgaaagatggaggttaaaatgaaaggcttcatattcaactgttactacatggtcttgtatacagtatgtacataataaatgtaccaatgtctgaaaaactgaaatgattataactgagagtgacaaaattataaaggcatttctcaaagcacacaacttatttcctgtgggggagaggagtagaatctcttaatttaaaacaaccttaatctatgaaattgctatgtaacttacccctttatctattttatgtgcacttgggaaaacttaaaacagttttactaatatggatttgccaggcactaatctttgaagtatgtatacacatattattaataattcatttaaccctcaggacaaccccaatcctacagacgggaagactgaggcacagagaggttaagtaacttgctcaaagatcacagcaagaatgcagtggaactagaatttgaatctcaacagtctgactcttaatcactatgataatgggtattggttatagctgatgtagaggtatatcattttgattaatatttggggtgatttctataaaagttgtacatccaaaccttgatcagaaatgtaacatcctatcattatgctggtatgtaatcaacctgattgacccctgtcaactggattgacaggggtagttaataatgaaattagggttaagcacccaagcctagattatgactttcactttataagcttaaggaatgatgtttagctataaaccttagaagaaatgcagccaaagcttgcagggaaacatacacacgcacaccaaaactcagctattttgaaattccacttactttaatgtttaagtcaaactactttaaaactgtttacatattactctatcaagggtgaaataatcgcatgtaaagggctttctaaaacaaatccacatcttggaagcccattttggggcgttgagttgtgactacgttctcaaggatgttaataacacaagagctccatccactaactccttgaaaaaaaccaaaaccatgaacgtcttgtcaaattcagacagtttatcttggcactggcaagtacagcagtctcttcgatgtctggaaacgtgtctaattacgtttagagagtaactaaaaaaatagccagtgtcccggaacagacagctcagggatcactccatagcatcctgaatgacaggatggaactacgccaggaggaaaaaaaaaagaagggcgaagaaagaaagaaaagaagcaagtgtaaagccgggatgagacgccagcctctctccaaaataatcctccagtcctcctagggccttcggggccaccgcaactctcgttcaagttatttcccttcagtttccatgaggtcaccggcccgcccacatccctcacctggcgcggggaagcgcgccctcccgcgcggcacaccctctgcacctaaaccccggacagcgcccagggctcccctctcagggaagcgcggcccttgagctcgacacgccccccgcaccccaaagcggccgcaccccaggggcgtccgctctcgggaaagcgcagccgcggagcttggcagacccccggacaccgcagcccggccgcgcctccatccctggagcttgggcgctcccgacaccccggatccggccgcgccccgaggcgccccctctcgggaaagcgcagcctcgcgcccctgcgcgcggccgctccgccctcacctgagcctgaggttggccatgaactcgggcatggagacggtgtccatcagcacgaagtctgccttgccgaattccaggctctcctgctccgccatggcgccagcgcgggggctcaggtgggcgcgctcgggcctccggggccgctccgtgggcccgcgatgagctcgggaggggccggggcgaggccgcgccgcgaggctacggggagggggcgcgcacgccgctcggcgggtccgggccggacagaggccgcctcgctgctcctcggcgccttctcggccggcgcggctccgaacgggacgcacccgacagtttccgctcctcccgccgcggctgccgggcgctgtaggggccgggacaccgagacggagacggcagcggctggtcccgcctccagcctggggctcgtcccggctccgccccgcccgggcctcccggctccgcccctcccggcccactgaggagcccgccccagccgcggccctggccgccgcctcttcacctgggcggcgcgcacgcgcgggtgggcggcggggacgcgcgctgggccgggcggcggcagctgggtggcagcgccccctggggacaggcgctgggatctcaggcggccaagaggatggccgcctgccgcccacacttggtagctgccaacaaagttagaaaagtagttcgtggagcttttcgcgaggacaattcattatgattctgtcaccctgctccaaaacccactcccgcctctctactcacaccctgcccattcttgaagtggtggttcaagcacagactgagaggtaataataatggctaacatttttggggcaccaaaaatgcccagagctgttctcagcgccttagagaacttttaagaaacttgccatacgactaggaagtggagcagctgcggtttcacgcaggtcatttgacttaggagccgcagcgttcaaccacgtctgactacctccattcttcagtggcccattttctcttccactcatccgagcatgtcatcagacattaccttatatgattattaagtttttaatatatctttgtatcatctctccaggattattgcggatgtcttgagcatgggaccattctttttgcatccaccaaataactattgtactactttgcatatataaatatgaaatccatactggttcagtggaatgaagtgagttgtaagtagtctccaatttattgatacattggttgagcttggaaaattctttttgaactcaatgtattttcccaaagaaaatatactacaaatgactttctttcttttttttttttttttctttttctggagacaaattctccctctgtcacccaggctggagtgcagtggtgcaatcacagctcactgcaacctcaaactcctgggctcaagcaatcctccagcctcagcctcctgagcagctgggactacaggtgtatgacaccatgcccagctattttttttaaataaatgactttctaaggtatctacatttattcagtcctgtgtttctgttaggacatcttctattacaaaatctacgaggaaatctagaggcctccaaggacctggctgggcttcaactctggctgagtttgagatgagtaaaccagactgaaggaccttgcccaaggcctgcttcagctgccagccacccacacttgctaagagaaaggaaaggagctttgtcacctcctgagggactgcctctgccatcagaaaaccaccccaatccctggcaccagcagagctgggttgcatctgactaccgttagcagctgtccttcagaaggaggagatccacctgtctcgatatcagtgtcctcatttgtggaataaaagctctggaataaggtaggactgtcctatggttgggtcatttgtggaggtgtcggtcagtggctaagtaggttattgcatagggtatggttgtattcctaatgtttgtattggcatgttttaacataagcagaactgaacttcaagaaggaaagaaagaaatctcaaactgtatgcactttggagcatccagggaccacaccccaaaaccttttggtaaattatatatgtgtgttccctgagctctgtaggtgttaaaaattagggcaaaatcccaggtaccaggaaaagaaacatcacggcttgcagatgatgagagagttgcagaaattgtacagtggttaggagctatggtgggatacaatgtggtttccaaatggccaaagtaagagatcctcattttaatcaacatcttatataggaacccaacatataaaacacatatacaacatatgcaaagggtattttattaatttcttgtataagtccaaattagtataaaattaggcattgatgctctcatgatgaacccaaatctgctcaatggggctcactattagcctcaggattccagtttacttttgtatgttgttttcattgtactgtgtcaagcaaattcttgtttgtataactaagcagtaatttgttacccatacaactttacattcagcatttctaggccaatgtgcagttacaacattattaatcaatgacacacttgagcaaagttcaggtatatgcacagccggcaggagagactgaatactctggtctgcattcagtcaaggtaacctagagcagattagctcattatgaatgttctttgtgataaaatttgaatagaaacacatttggagatgcatgtttttgttacagtttaaaatatacaaaaaataaaacaaataaaagtttatatccccaatcatgagacacacagacaccatgagcctcctgatatggtctcctgaaaaagacacatatcatttacctgctaaaaatacgtaaatggaatctaatcatgaagaagcatcaaacaaactcacattaaggggcatcctacaaaacaattgacctgtattcttcaaaaatatcaatgatgtgaaagacaaagaggctgaggcacatcactattaaaggcaatgggtgattctggactggatctccaaccagaaaaatgtaaaggacattgttgggataattggtgaaattcaaatatagacgcgatgttagatagtaggatagtatcaatgctagtttttctgaacttgatcattttactgggattctgcaagataatgtccttgtttctagcaggtatctgctaaagtatttaggagtaaaatgatgtctcgaactgtttggcaagaataataaaaataataagatgaggaggtggaaggagggcgtgcatatatattggtagacatataaatgattaaagcaaatgatgcaaaatactaacaagtggtaaagtcattaaaaatatatgggacttttgaggggattttcttttgtactatcctcacaacttttctgtaactttgcaattagtttgaaatttattcatttattttgagacggagtcttgctctgccgcccaggctgaagtgcagtgacacgatctcggctcactgcaacctccgcctcccgggttcaagcgagtctcctgcctcagcctcctgagtagctgggactacaggtgcatgccaccatgcccagctaatttttgtatttttagtagaaacggggtttcaccatgttggtcaggctggtctcaagctcctgacctcatgatctgcccacctcagcctcccaaagtgctgggattagaggtgtgagccaccacactcggcctgaaatttaaacttaaaaattaaatagtaatctaaaactgtgctaaataaaaatttttaatttaaaaatattaaataacacttagaaatcaaagtcacatcagaattttgcaaaccttccagaactgaagaaccagcagatatttttgaaaaccctggtccagggtacctcttagctctatttggcatagatgtgctaggagattataaacactgaacaggtaattctaaaaacaaaaataattagatgtcaaatatacccatatgcccctgagaaggtgcatcctgttctctgcctgaagttctccccgccaccccacccctcactcctatgacctagctaacttccgctcatccctccgctctcagtctcaacatcacttcctccaagaaggcttccataatctcctgagtcagaattggctgttcctcctctgtgcctcctgcagcatcctggaagtgctgcccccattacagtactaaatgcccttgagcctactgtctgtctctctcactcgtttgtaagggccatgagggctggaagctgtcttttctggtttttgatgtaaatgtaattctggcacctcctagcatagtgctaagagatgaagtgcttaataaactgttgcttgataaatgaatatggaatggtctgtgaacctatgggtcataaaatgtgagactgtaaatccaccccccttggtagttttctgcattgcaaattagtcattgtacaacattaacctcagtctcatctcctgccccggaagcagatctcagggctgtgtttatttctcccctgggaccaggcctgcacactgtgtgttcacactgaacaaaagctactgttccaaaaacccttctgtagttaccagccactgcagagggtctactcttgatgatccacgaaaatcaaccctgaattttccaccacaaatgtttattcccattcaactttcccagaatgtttctgggctgccctgccctccctccctttaccagaggctttgcatccaaggaagacaactctttcagcatgagtctggcaagacagaaataagacagctaggaaaaaaacaacaacaacaatagtcacacagcatattcaaagggcattttataaatttattttataatcccaaattatcacagagcagaagtagaaaggcaaacatatgttgcaaaataacttcattacgtacttacagccatatagaaatgatttggaactctgccttagaaaatatccaaaacatacctcctcctctttactgcatgagcctggatttgaactaagaatgatacatcagaaatagcatatgtacttttcatggcttctgaagccaaaaaattctttaagtataaagagacctgacagttgcctctctgatgtcattaatgacttttacccacctgtagagtcccctctctcccctaacccccaacctgacactctagacatctcacaggacaaaggaaagggagttttcatggcagggatcactaccctgaaccatcctgaaagtccaaaaagtgatttttaaagttcatcttctcacctctaactcttaaagacagaagactagcaagccaattgctaacgacttggctttgagttctagacacttcttttctccattgttcctgtggtccagctgtgcttacctgtgatggtgttgagttggggactggagtgactgtgataccacagacagagctccttttaactaatcaggctaagcacagagggtgttgggagatgtcagctgaagaggggaggagatagaggaggaagagaaggaaggagccggtactacaagggtgtcggcagcaagaggagagtagcaaggcactacttctcaattttaggtttcatcatcctttaataaaaacgtgtggacttccggctgggcacagtggcgcatacctgtaatcccagcactttgggaggctgaggcggatggatcatgaggtcaggagttcaagagcagcctggccaacatagtgaaaccccgtttctactaaaaatacaaaacttagctgggcatggtggcacgcacctgtagtcccagttactcaggaggctgaggcaggagaattgcttgaacccgggaggcggaggttgcagtgagctgaaatcgtgccactgcactgcagcctgggcaacagagcgagactctgtctcaaaacaaaacaaaaacacttgtggactttttctcttgagacaaatatattaagcacatacacagaacagtttgcccacgggccaccaattcacctccacccctggaagtaacctctcttctacgggccccaagttaaggactcctgagctaagggaaagatcacaccacaattcctgattattttggaatggagaagaattatagcaagccatcactgtcagtatcctgtgagtcaccagacagggactgtcccaataactcatccccctgtgtgggcagacaagccacagatgtaaggccacaggaaagatagaatcagagggtggaggcggacaacctggaactgcctccagaattattcctgcttgccatgacgtagtttctgactataaacattcaaagggaatgcatcttctttaggaattacagaagtgtttatcactctgggttggagttggctgttcaggcatatccctaaactctctaggacaggggctgtgcccaactcatccttatatctacaacccctcaaactgtgcctggtacccaacaggtatttcttgagtgtagtaggtgaattaattagcaagttaattagtaaatggatgtgtgtagatgtattgttccattttaagggccatatggcctttccttaagccccaaaccaaataatcactaaatctcaagctattctgccattgaaagcagtcctagagctagaaagtttgggagtgtgataggaacccatgagagggaaaacaaaaagacatatcacaatctattcatggattgatggtgtcttaaggcaggatgtctcaagctttaaagtgcagaagaatcacttagggggccaggcgccgtggctcacgcctgtaatcccagcactttgggaggccgaggcgggcggatcacgaggtcaagagatggagaccatcctagccaacgtggtgaaactccgtctctactaaaaatacaaaaattagctgggcgtggtggtgggtgcctgtagtcccagctactcgggaggctgaggcgggagaatcacttgaacccgggaggcggaagttgcagtgagccgagatcgtgccattccattccagcctggtgacagaataagagtccgtctcaaaaaaaaaaaaaaaagaaaaagaaaaagaaaaatcacttagagatcttgtcaaaaatgcagaatttgatttagtaggtctgggtcctgaaattctgctcttctaataagctcccaagtgatgctgatgctgctggttctgagaccacactttaggtagcaagattctaaggaatagaatgttgttacttgaacatcatgtttaagtatgatgatatctgtaaaggaggatatgtttggtcatatcaaacatcctcctttacagacggacaaaccgagtcccaggaagagtggctgactaactagatcaaagtgaggcagtggtagagctgagaccagaactcaaaatatgtggtttgggtcatgtaatgggtagtttccactatccagcatggacattcaattaagagattgcgccgggaggctggggcaggagaattgcttgaacccaggaggccgaggttcccgggtgggccaagatcgggccactgcactccaccctgggtgacagagtgagattctgtctcaacaacaacaacaaaaaattaaacaatttaaaaaaatttaaaaagagagaaattgcacttcgtgagatgaagttcaggaggtaaggtaagtagaagtgagggagagcaacaccctagatcttctctgggtacccccagaacttctgttcctttcccatttgtaaatattgggatgatgtcttcattttctctgtcccctttttctcctaaaagtttagagtagaggttaaagaggagatattgttgggattggaagaaaaccgttccaattccaagtactttgctactttgtcaggtggagggaagaaatgaattggaatggttttctttcaaacccaacaatatctagtaactagtacaagatacgataataataactagtactagatacatctactactacaatatctaatacctagtactagttagtactagtttcacctagcattcatattgggtcagtatctgcagaattgacattccaggaagagtgcaacatcatatttagggtgatggataatctgctcccccaaactgctttcctcctgccttttacccagagtttctcagtttctcaactggtaagctgcagcagtatccatctcctagggttaagatcctgaaataaaatgcatagcatgaccctctgactttttccaaccaactggattaattcttcagaatatctagaggtataaataatgtgagccatgcttatatccaaatctgacaacctgaaccctgaagaaattatacaggggaaaagtttcaatctaggagatcccagaggtcatgtaacccaatatctcatccaatgcctgaatcccctctgtaatatgccacaatgtctgcacctacctgggacatttgcctcattaggcctccctcatgcccagaaggtatatctacataaaaacagctcattcatctgtaatcccagcactttgggaggccgaggtggatggatcacgaggtcaggggtttgagacctgcctgaccaacatggtgagaccccatctttgctaaaaatacaaaaattagctgggcatgctggtgcatgcctgtaatcccagctactcaggaggctgaggcaggagaatcacttgaacccaggaggcggaggttgcagtgagctgagattgcaccactgcactccagcctgggcgacagagcgagactccatctcaaaacaaaacaaacaaacatctcactcactcttagtcctgaaccactgcccagactcgctgcatgccctgtatgccaaccagctcccaactgtcccatcttcttgttcctcattatccctatttatgagcttgatttgtcctttggagcttatatgccaccaaggtaggaccagcttgaagtgaattgtaatcaagctggggggccaaggtcagggccaggtagaaaggagcctcctacttttctcaagttgacctgtctttagagtttctgtccataaaattccaactcttatttcaccgatctttttgaggtccagcgtctcaatgtctcagtgtgactttgcttatctcctcacagtgtcactttctcttagtgttctcatcctttccaagtctctaattagctctcctgaactgaataggattctgttcagagtagcatcctccccatactcaggaggcagtggtggcacagtggtacccaaactttgggtacctgcaccagaggcttagagatctgaattttaataagcagcccaggagattctgctgcaggtggacagggggccaaccaaacttggagaaatattgaggggaattttggtgtcatacactggagttcaagtcctaggtctgtatgaccttgaacaaattagctcatctgcgtaagcctcagtttcctcacctttaataaagatgagaaaaacccacctcgaagtgtgaagtgaggtgacatctataaagtgcttcatgtaatttaaggcgggcagtaagcactcagtaaatacaagctagcattgctattagtgcaattgcttctgttatcttcagaatagggaattattagaagcagataagttgtagcatgtcctttttagcagactgagatttctaattgatgcctgtgagcttctggtcacgctgtgattttcctctatgtgagttttatgattcctgttgatttattaccatttacatgtatagccctgggccttgcacttagtaagggatcaaaacttcctctgcgtgtgtgtgcgtgtgtttgcgtgtgtttaaaataagagacagagtctagctctgtcagactggagtgcagtggtgcgatcacagctcactgaagcctcagactcctgggctcaaacaactctgctaccttagcctcctgagtagctaggactatataggactacaggcacatgccaccatgcttggcttatttatttatttttttaaattttttgtagagacagggtctcctatgttgctcaggctggtctcatagagacagggtctcctatgttgctcaggctggtctcaaactgttgggctcaaccaatcctcctgccttggcctcccaaaatgctgggattagaggcataagccactgcacctggcccttcctgaatatatttgaatgagtgaattccctctgtgctacaccctcactgcagcatcacatttcttcttcccattccccgaatgctctccagcctcctcctgacataaagccctggtttacgtccctcctggcacaactcttcccatttccccattccgtgtgaagagtgccatcccatggagccttgattgttacctgccaatttgtatatgttatttgcattaaaacttctgattcacggaggagccaagatggccgaataggaacagctccggtctacagctcccagcatgagcaacgcagaagacgggtgatttctgcatttccatctgaggtaccgggttcatctcactagggagtgccagacagtgggcgcaggccagtgggtgcacgcaccgtgtgcgagccgaagcagggcgaggcattgcctcacctgggaagcgcaaggggtcagggagttccctttccgagtcaaagaaaggggtgacggacgcacctggaaaatcgggtcactcccacccgaatactgcgcttttctgactgacttaaaaaacggcgcaccacgagattatatcccacacctggctcggagggtcctatgcccacggaatctcgctgattgctagcacagcagtctgagatcaaactgcaaggcggcagcgaggctgggggaggggcgcccaccattgcccaggcttgatcaggtaaacaaagcagccggaagctccaactgggtggagcccaccacagctcaaggaggcctgcctgcctctgtaggctccacctctgggggcagggcacagacaaacaaaaagacagcagtaacctctgcagacttaaatgtccctgtctgacagctttgaagagagcagtggctctcccagcacgcagctggagatctgagaaccggcagactgcctcctcaagtgggttcctgacccctgacccccgagcagcctaactgggaggcaccccccagcaggagcaccctgacacctcacacggcagggtattccaacagacctgcagctgagggtcctgtctgttagaaggaaaactaacaaacagaaaggacatccacaccgaaaacccatctgtacatcaccatcatcaaagaccaaaagtagataaaaccacaaagatgggaaaaaaacagaacagaaaaactggaaactctaaaacgcagagcgtctctcctcctccaaaggaacgcagttcctcaccagcaacggaacaaagctggatggagaatgactttgacgagctgagagaagaaggcttcagacgatcaaattactctgagctacgggaggacattcaaaccaaaggcaaagaagttgaaaactttgaaaaaaatttagaagaatgtataactagaataaccaatacagagaagtgcttaaaggagctgatggagctgaaaaccaaggctcgagacttacgtgaagaatgcagaagcctcaggagccgatgcgatcaactggaagaaagggtatcagtgatggaagatgaaatgaatgaaatgaagcgagaagggaagtttagagaaaaacgaataaaaagaaatgagcaaagcctccaagaaatatgggactatgtgaaaagaccaaatctacgtctgattggtgtacctgaaagtgatggggagaatggaaccaagttggaaaacactctgcaggatattatccaggagaacttccccaatctagcaaggcaggccaacgttcagattcaggaaatacagagaacgccacaaagatactcctcgagaagagcaactccaagacacataattgtcagattcaccaaagttgaaatgaaggaaaaaatgttaaaggcagccagagagaaaggtcgggttaccctcaaagggaagcccatcagactaacagcggatctctcatcagaaaccctacaagccagaagagagtgggggccaatattcaacattcttaaagaaaagaattttcaacccagaatttcatatccagccaaactaagcttcataagtgaaggagaaataaaatcctttacagacaagcaaatgctgagagattttgtcaccaccaggcctgccctaaaagagctcctgaaggaagcactaaacatggaaaggaacaaccggtaccagccgctgcaaaatcatgccaaaatgtaaagaccatcgagactaggaagaaactgcatcaactaacgagcaaaatcaccagctaacatcataatgacaggatcaaatgcacacataacaatattaactttaaatgtaaatggactaaatgctccaatgaaaagacacagactggcaaattggataaagagtcaagacccatcagtgtgctgtattcaggaaacccatctcatgtgcagagacacacataggctcaaaataaaaggatggaggaagatctaccaagcaaatggaaaacaaaaaaaggcaggggttgcaatcctagtctctgataaaacagactttaaaccaacaaagatcaaaagagacaaagaaggccattacataatggtaaagggatcaattcaacaagaagagctaactatcctaaatatatatgcacccaatacaggagcacccagattcataaagcaagtcctgagtgacctacaaagagacttagactcccacgcattaataatgggagactttaacaccccactgtcaacattagacagatcaacgagatagaaagtcaacaaggatacccaggaattgaactcagctctgcaccaagcggacctaatagacatctacagaactctccaacccaaatcaacagaatatacatttttttcagcaccacaccacacctattccaaaattgaccacatagttggaagtaaagctctcctcagcaaatgtaaaagaacagaaattataacaaactatctctcagaccacagtgcaatcaaactagaactcaggattaagaatctcactcaaagccgctcaactacatggaaactgaacaacctgctcctgaatgactactgagtacataacgaaatgaaggcagaaataaagatgttctttgaaaccaacgagaacaaagacacaacataccagaatctctgggacgcattcaaagcagtgtgtagagggaaatttatagcactaaatgcccacaagagaaagcaggaaagatccaaaattgacaccctaacatcacaattaaaagaactagaaaagcaagagcaaacacattcaaaagctagcagaaggcaagaaataactaaaatcagagcagaactgaaggaaatagagacacaaaaaacccttcaaaaaatcaatgaatccaggagctggttttttgaaaggatcaacaaaattgatagaccactagcaagactaataaagaaaaaaagagagaagaatcaaatagacacaataaaaaatgataaaggggatatcaccaccgatcccacagaaatacaaactaccatcagagaatactacaaacacctctacgcaaataaactagaaaatctagaagaaatggataaattcctcaacacatacactctcccaagactaaaccaggaagaagttgaatctctgaatagaccagtaacaggagctgaaattgtggcaataatcgatagtttaccaaccaaaaagagtccaggaccagatggattcacagctgaattctaccagaggtacaaggaggaactggtaccattccttctgaaactattccaatcaatagaaaaagagggaatcctccctaactcattttatgaggccagcatcattctgataccaaagctgggcagagacacaaccaaaaaagagaattttagaccaatatccttgatgaacattgatgcaaaaatcctcaataaaatactggcaaaccgaatccagcagcacatcaaaaagcttatccaccatgatcaagtgggcttcatccctgtgatgcaaggctggttcaatatacgcaaatcaataaatgtaatccagcatataaacagagccaaagacaaaaaccacatgattatctcaatagatgcagaaaaagcctttgacaaaattcaacaacccttcatgctaaaaactctcaagaaattaggtattgatgggacgtatttcaaaataataagagctatctatgacaaacccacagccaatatcatactgaatgggcaaaaactggaagcattccctttgaaaactggcacaagacagggatgccctctctcaccactcctattcaacatagtgctggaagttctggccagggcaattaggcaagagaaggaaataaagggtatccaattaggaaaagaggaagtcaaattgtccctgtttgcagatgacatgattctatatctagaaaaccccattgtctcagcccaaaatctccttaagctgataagcaacttcagcaaagtctcaggatacaaaatcaatgtacaaaaatcacaagcattcttatacaccaacaacagacaaacagagagccaaatcatgagtgaactcccattcacaattgcttcaaagagaataaaatacctaggaatccaacttacaagggatgtgaaggacctcttcaaggagaactacaaaccactgctcaaggaaataaaagaggatacaaacaaatggaagaacattccatgctcatgggtaggaagaatcaatatcatgaaaatggccatactgcccaaggtaatttacagattcaatgccatccccatcaagctaccaatgactttcttcacagaattggaaaaaactactttcaagttcatatggaaccaaaaaagagcccgcatcaccaagtcaatcctaagccaaaagaacaaagctggaggcatcacactacctgacttcaaactatactacaaggctacagtaaccaaaacagcatggtactggtaccaaaacagagatatagatcaatggaacagaacagagccctcagaaataatgccgcatacctacaactatctgatctttgacaaacctgagaaaaacaagcaatggggaaaggattccctatttaataaatggtgctgggaaaactggctagccatatgtaggaagctgaaactggatcccttccttacaccttatacaaaaatcaattcaagatggattaaagatttaaacgttagacctaaaaccataaaaaccctagaagaaaacctaggcatgaccattcaggacataggcatgggcaaggacttcatgtccaaaacaccaaaagcaatggcaacaaaagccaaaattgacaaatgggatctaattaaactaaagagcttctgcacagcaaaagaaactaccatcagagtgaacaggcaacctacaaaatgggagaaaattttcgcaacctactcatctgacaaagggctaatatccagaatctacaatgaactcaaacaaatttacaagaaaaaaacaaacaaccccatcaaaaagtgggcgaaggacatgaacagacacttctcaaaagaagacatttatgcagccaaaaaacacatgaaaaaatgctcatcatcactggccatcagagaaatgcaaatcaaaaccacaatgagataccatctcacaccagttagaatggcaatcattaaaaagtcaggaaacaacacgtgctggagaggatgtggagaaataggaacacttttacactgttggtgggactgtaaactagttcatccattgtggaagtcagtgtggcgattcctcagggatctagaactagaaataccatttgacccagccatcccattactgggtatatacccaaatgactataaatcatgctgctataaagacacatgcacacgtatgtttattgcggcattattcacaatagcaaagacttggaaccaacccaaatgtccaacaatgatagactggattaagaaaatgtggcacatatacaccatggaatactatgcagccataaaaaatgatgagttcatgtcctttgtagggacatggatgaaattggaaatcatcattctcagtaaactatcgcaagaacaaaaaaccaaacaccgcatattctcactcataggtgggaactgaacaatgagatcacatggacataggaaggggaatatcacactctggggactattgtggggtggggggaggggggagggatagcattgggagatatacctaatgctagatgacaagttagtgggtgcagcgcaccagcatggcacatgtatacatatgtaactaacctgcacaatgtgcacatgtaccctaaaacttaaagtataaaaaaagaaaaaaacaaaaaaacaaaaaaaaaaacttctgattcactctgtgttaaagtgtgacttgaatttgtttaaaataatgagaaaaaacaaaaacaaacaaaaaacaacaaaaacaaaacaaaacaaaaaaccttctgattcactctatcatacatgctctgtgtataaatggcattttattttattttattttattttattttattttattttatttattttgttttgagacagagtcttactctgttgcccaggctggagtgcagtggtgtaatcccggctcactgcaacctccacctcccaggttcaagcgattctcctgcctcagcctcccgagtagctgggattacaggtgcccaccaccacacccgactaatttttgtatttttagtagagacggggtttcaccatgttggccaggctgatattgaactcctgacctcaagtgatccgcccgccttggcctcccaaagtgttgggattacaggcgtgagccaccacacccagccatatatggcattttaaaatagagagtttaaagatgagactggtgacttgagagtaagagttgggggtggggtgggggcatggttttgacaaccaggcaacaagcaactaccttttcctttcatacttgttcctttccagtacacagaggtattctgtttagtttttgttgtcgttgttgttaactcaggcactattcagatttttttttcagggttttaaattcaggactttgcagagtatcaaagaaataattcagaagaattcaacctacactataaataagttacatttgaaattctccagcaatgaattgatacatgtagcaattatgtagagcacatgtgtaactacaaacattgtggggctctggtgttcagttttggaaggagagagaatgcgagttagaaagcaaaggctccaaggctggctttgccactcagacactgtatatgaccctgtgcaagtcacttaagccctctgaacctcagtgtccttctctgttaagtggagtaatgctaatatcttacctcatagcgttgctctgataattaaatgggataaagaatgttagtgtggcatctgggacatagttagggctcctaagttgacggcactgttattatctgccagtcccttgcaccaaggctttgaagcaacttataaccagtagtaggggaaagagtgtctgttctgatctggttcttctctcctttgacaccctggttctctggtgtcctcttatctgttcgttcgtgtcaggctggtcaattccttgtagctgaactgatacactaattgcaggaagttcatgggctatctacaatttctcaaagttgagtcttgtagatacagtcacttcctggcatttttgttcatgctgtcacccaagttcctaattgctgttgcataaccaggtatgtgcttgcctttcagaggatgcgtttttctcctgatgcaaatacaaatacaaggcataagtgcaatgtctgtgaatagatgcctcctccactccaacccaaatcttgtgtagttgtttcaggaagctttcatagatcaataaattccatatctggttggtcattagatttacctggcctgctttagaaacatctatcttccaggtttcactcccagtcttttgaatataaatcttagtggctaagaatcatgtaataaaaacaccttgagttaggtacaataaaagaataacttctgaaatgactgttgcctggtaaattaatggccattgcatcaaagtagcctctctcgtttagagtctacacctaatcttttttttttttttttttttgaaacagagtcttactctgtcacccagaatggagtgcaggagtgcagtggcatgatcacggctcactgcagcctccatctcctgggctcaggtgatcctcccacctcagcctcccaagtagctgggaccacaggcatgtaccaccatgcccgacaatttttttttttttttggtagagacagggtttcaccatgttgcccaggctggtctcaaactcctggggtgaagtgatcctcccacctcggcctcccaaagtgctgggattacaagtgtgagccactgtgccggcctacacctaatatctattaaggattctgagcaccttcatcttctgcaggtgtgatcactaatttaattaggaaagcatacttcagcgctccctataaaacctttttggagcacacactgacctacagccagtgctctgagctaggggcctaaagattgagctttcaacatgtatttcatttgcttaaatgacctaagattccctaagaacaagactgagctttatttcccagtcaaaaagaagcatgagtgggccaactcagccactgggaagaagaggaggtggagaaagaagaggaggaaggaagcctattttagttacatggggaaaatcctaaagcaagtgagttggtgcactctttgtagaagcttagaatggccaagagaggtatcatgttagcggccctgggtatcatcttgacttcaacttactgtgatacaggagtccttcacacatagtgttcctgaaaagttatgtgccaacagcttttctaaattggatctgctaatggctgctgtcttctctcgcttcgttttctttctgttggcagcagctctgaacacctgagctcttaatgaatgtctctctcgctctcgtatctgttgacaggcaatctgtaaatctgtaaactgattctttttccttttttttgagatggggtcttgctctgtcacccagactatagtgcattgttgcaatcatagctcactgcagcctccatctcctgggctcaaatgattcttccacctcaacctcccaagtagatgagactataagcccacgccaccatgcctagctaatttgcttgtctgttttagtgggtttttattttttttagatagggtctcactacgtttcccaggctggtcttgaactcctgggctcaagcaatcctcctatgttggcctcccaaagtgttggaattatagacatgagccactgcgcctggcctaaactgattcttaaacgccctctccttttcttgtaaagcggatatttgccacctagtctgttttgtaactttgaagagtggcatagatcagttttcgtcaaatgatgctctgtatttctaatattacttaggaggggtaggcaccctggttccttcctcctgcccacccaacttcaccccgtggcataagaaattggtagaaaacaatcaggaaaatcttccccctcaaaagctgggaagattcaaaagatgtaaggagattttctgaaatcttgactgaattttacgccttcatgacaaggaagtaagtttgagtgttcacgtgtgtcataccacagctcccatattccggtaatatcatctagaatctgttgcttatcttgggaaacaaaggggaaaatgagattaaggaaagatgggagaggagagaaggtgcatgatgtgtagtgaggatatatagaacagagcttctcaaccatagccctgttgacatgttggggctggttaactctttgttgtggggttctgtgcattgtaggatgttaagcagcctctacggcctctatctgctacatgccagttgctccctccctcccagttgtgacaaccaaaaatgttcaggcattgctgaatgtcctctggagggcaagattacccccagtggagaacccctgctctagagcctgtagggctggtaggaccctctatgggagtacttgcattaagtagtcctttgtgcattccctggacattctcctctaattagtctttctttggcttgttcttaactgtgtgggcctggcaggccaccttgtacctcccaaggcttgggtctgtggctggagtcactgtctcagggcactgtaaggataaaacaagatattggttggataaatgtattgagtgtctaagtggtctaagtgcaagccttgtttgctgtgggaactcagatgaaaatgatgcagactttattgtaaagggactcacaatcctgcggtgggagagtgttgaggaggaagtatttctcaattattagaaccaggaaaactttttgaatctcacctcaagcctccctctctcctccctctccctctcatcccccatctcccccttcttccctccctcccctctctctctgtcttacacacacacacacacacacacacacacacacacacagcaacaagaagctgagagcagtgtgaaaatatgacttgctccatatgtctcatgtccaagtggagctaggattagagcgttgggtaaatgattctcagaacagcttatttttactactctggttgtctctctaacattaaacaaggacactaatgacatgtagcaacatgtgatacagggcctgacggcagagagtgccaatgttctcagtgggaggaggaacttagtaagtgtgtgtggaacacagataagggagctggcacttggggaggagccttacaggatggataggatctgaagagtgctgttgagtgtcagcatggtaggtagaagtgacagatgaacagtggggtggaggctggaaaacacagggacacatccgaggaagaccaagttttccagcctggctgaagaccacaaagaagtaacaggaagaaagagaggctgaagattgagaaatgtcaaagtaaaatgcttacttaatgtgaaatataaagtgggaaagcacattctaaactaagtgttttccatcttcagatggtgttggacgttaactccacttctgttaggaaaaaccaagtcacaaaggttgaagtgactggaattagtctgtgttatccaaacaacggttatctttctcaccagctccaaattcccgtccctctcttctttctcatcccaagaaactgctgataggtactgtggaccccaaaaatctgagataggtctcagttagcttagaaagtttattttgtcaaggttgaggatgtgtgtccgtgacacagtctcaggaggttctgatgacatgggtccaaggtgttaggggcacagtgtggttttatatattttagggagacatgagacatcaatcaatatgtttaagatatatactggttcagtctggaaaggtgagacaacttgagtcgaaggcaggacaactcaaagtggggaggggcttccaggtcataggtagataggagacaaatggttgtattctattgagtttctgattagcctctccaaatgaggcaatcagatatgtatatatctcagtgagtagagcagtgactttgaatagaatcaggtttgtcctaagcagttctcagtttggcttttccctttagtgattttgggggtcccaaggtttattttcatttcacatccccccttttcttttttaaaatcttttggagaaaacattttaggagaaaattaatctgctctcaggttttgtctgatgtttcatggctaggatggtttatttttagatgggtaggtcttgagttactaggaaagttcatttttagtaagttgtgaagtctcatgtcctatgaagataaagtagggggaggaagggagaaaaacaaaaacaaaagaacaatattggaaaattggtataggccatattactctgaagtccatactttagtaggcaggtatgaaagtggcttatgtatgtaaataggttgctattattttcttctgaagtttaagttgtctagtttcagttcgtagggttttatgaaagcacagcttagttttcagtgactctaaactgggaaagatgtgggggaagaaaaaattgaaaacattattttgaagacttgtagccaagaaaaattagaatttggtctgaactgtagaaaataataaaaatcgaacaacattaggcaagactagaatctaataacaggtgtaccatagtttttgaaatataatttttctctgtctagtttaccatttttattaaagacaaatcatggtaggactgatttgttttattatacttggcctgattatttgcatatagtatagcaagaaaaattttttaacataggcttttaaattggctttgatggaactttgttccatagaaagaaacttagataagagtttttaaaagccaagcccagtcatggatttgtaccatcaaatacctatgagttgagtgaattcttctcctcttgaggttccaagataaacttggggctcctgggcctgtcagaaagtgacattctttacttatcataagtcagcctggctgaagacctgtacagggactgtgtcaacaaggtatgaggccagttttcctaaggggcttttattggctccataagtcaagtgtgattctttaaaggaaagcacaccattccagtcaaaagtcttggtaaaataaccagtttctctagtcgtgtcctgttataaatgaaaatagattcttactgtacttttgtaaataactgtattttcaaaagttaagaatactcataaatagtttgtaaattctggagaagtcagatagagagaaacaaatatgttttaaagtttgttcataggcatatactaaattgttaaaagttgtcaatagctcaaaggaaaagtttccttgactatgaaaaaaacaaaacaaaggatcagcaataaagttttaagtcagaagtcaaaaagattatttcagtcttctattaggtcactatttataaacatttccgttttccatgaatcttaaacatttttcttctattctgatgtcacagtctccaaagttatcagaaatttgtattcaagaggatctgttagagctttatggttgtttataaagccaccttctaaagaggaccaaagcaaacaacaattgtctgtggatgacaaagttttaggtcagtcatagctgacatacaattgacaaggaaatttgttacttctgtggcacacaataatttaacataacaattataattactgataatgtatactaagtcatatcagaattataggaatttcccataattttggaacacataccaataacatatttatataaatacagcccagataaagtcaaatatcattttagatttgacttgtttcctgtataatttgtatataaaataattcaaactaggacttttgggaaacccaatatcttaaaggattaaattttgactttagggaacctaatatcttaaaggattaattaggtcagaaaaagacaaaatttataatttgattttggaaattttgtaaaatatcaaaggttaaaaacacaggtcattgtaaaacaagtcattcatttgaccaaagtgataactcaaggatttcaaaaaaaggcaaaaactttcattctttgagagaggacacttaattttccaaacaataagtcctaataaacagtatgaaggcaactacaatttttttttttttgaaacggagtcttgctctgtcgcccaggatggagtgcagtggtgtgatcttggctcactgcaagctgcgtctctggggttcacgccattctcctgcctcagcctcctaagtagctgggactacaggcgcctgccaccacacctggctaattttttgtatttttagtagagacagagttttaccacgttagccaggatggtctcgatctcctgacatcatgatccacccactttggcctcccaaagtgctgggattacaggtgtgagccactgcacccagcccttgtttttaaaaattttataagcaatctataaaattttaatctcggccaggtgtggtgactcaagcctgtaatcccagcactttgggagactgaggcgggtggatcacctgaggtcaggagtttgagaccagcctggccaacatggtgaaaccctgtctctactaaaaatacaaaaattagctgggcatggtggcatgtgcctataatctcagttacttgggaggctgaggcaggagaattgcttgaaccaggaggcagaggttgcactgagccattatcacgccactgcactccagcctgggtgatagagtgagactctgtgtcaaaaaaaatttttttttttaaatcttgaccataagatataatttccataaaccttttataacttttattaaggagtcagttaatgtttcaaaaaaaccttgttaatctgacataggggcttatgcattggtcttgtatcagtgtgtctttgatattaattattaatttatagggaaactgaacttattttatctctcaaaatcagcccttaaaaatctcacatattcacctcttctgtgatagtccctgggccttgaggagttgaataattttaatttctggccctgtgacttcaggaatgtagtttattttaattgacatcttctattgggcctgaagatgaggctttaattgttgtcagtgtttaagatttagcaggacttggtgtcctttttagtcccaggagtcaaagtcctataactcaatgtcacaagtactttaaaagtacttgtatttaaaagtatgagctgaaaatgagttgaaggagagcattactattttgtgccctttaaaaggagaaagaaaactgaaaatggcgagatgcaatgaaagttgaactttgggctaaaaaaagttaaaatctcttgtaatttattaagagtaagtcaatcccttaagaaaatttcattgttctaaccaattatttagtgtagaagtgttttttttaacatcaagcccaatttctagaaagatcattatactttctctttaattgacaacttgatcatataaaacttttttaaaaaatgaattttcttattgtgacttacacagactgttcataacatgtttggactttctggcttgtcctgaacatccctctttcttaaaccatcagttattttactttaggactaaatctaccgtacaagactctttctcatttctctttacgctttcttaccgaaaaaaaaaaaaacctctttacttttataactttcttcacatctttcttacttctgggttccttttatcttgttttatacataacctttaaatacattttaaattagacagaagtcatttacctagattatttctgaaaactgtgataatcatcatttaaagttatggaaccatcattgtaaaattataactgagacagtgatctcagttttaacctccaagttgtccttgtttattttggggtgtgggctgaactaactttgggaggaatttatagtttagctttgaaacaaagatgataacaaacccttccccaaacaaaccttactgcctgtagactagaccgtctaaagtcacaaaattaggagttatggtaatcttactaaattcaagatatagttttttattaaatgaatatcaatatcttattaaagattacacaagttggctgggtgcagtggctcacgcctgtaatcctagcactttgggaagccgaggcaggcggatcacaaggtcaggagatcgagaccatccttcataacatggtgaaaccccatctttactaaaaattcaaaaaattagccaggcgtggtggtgggcacctgtagtcccagctactcaggaggctgaggcaggagaatggtgtgaacctgggaggcggagcttgcagtgagccgggattgcgccactgcactccagcctgggcgacagagcgagactccatctcaaaaaaaaaaaaagaaattacacaagcaaagatcattctgtttttgggctgtgtttatagttttgtaacccctataccaaattttgacacctttatagtatttggcagggatagaatgaaattgtttaattaataaatgcaaacaacaatgtatgttggcaattattaagacatttctaatattactttaccaataatgttaaggttaatttattaaagattttacttgttacataaacttgaaagagcatttgactagtcttttcttttttcctgataaagtatttgattcaagtgttttattttcttaagccaattagagttcttttatatattttcagtagtgaaatattatatatatattatatatacaacacataaatacatagatgtattaggcatgccagtggaagtacttcctatcagttcataaaaaactttttttttcctatcttagactttcaaattcttaacaacctgttttattatcttaggcacttgtcagttaaatagtcttaaacttgtatattaaaggaaacaactcgggtaaaaatctaatggcaaaatttacatcgtaagttatggagagaaaaagtctgtgttagagggaaattaatatgaatttaattgtcatttgaacataaaattatagaaattataaagtccttttaaatacacacacaccttatagtttttacttcagaactttagccatgagataaatacaaattcaccagcttgcaaaatgaatatgttggatctaaacagtggtttttatctgaagagaaaaataacagcagatttaaagcaggcagaagagaaaaatagcgaaaaagaatttaggaacaacgtagtttgcaggtcaaacttagggctctttttctctaatgtaagtgtgtacaaggaccatattccattttacataaactctggcaagtagaggtgtcataaaacctacagagtgttcaaaaggaggtcattctccttgttttctcctcattagattatgtctcactttttttctgaagagggggaactgagctgtggcctcaggttttttgtgtggtggtttgatgtgtgctgcttgtggccagactccacaatgtgtcaccactaagttgtttcaccctcttacgtgtctcagtttctctctccagaggtctaagacttctgagagggttcaaaatgccaggtgatcagtttttatacgtgtttcctggatgagtcttttttttaaattaatttttgttggagatttccctgtggggttgttgtatgtcatgggggtcaaccccccagacactcccacaaggcccccggtcacccaggggcacctttcagctgggaggagcaaatgccctttctcttcagagctgagaaaactcagtctctcatttatctatgaaaacaacagttcagttcctcatgtaaatgtacacagacaagccgaattgagattacttttgggagacaaagtagtagacaagacctcttagaatgcatctccgaactagaattaggctccttaaacaacaacttcctaggagagaaaaaataaacaacagccaagggcatttcctgtagactgtgttcagccacccctactttgtagctctcatccaccattacacacatcaaggtcaaatcctctcacagtacaagataacctctggtacccccaaagccaaagaggtcaggtcatgtaatacagaaaaacagacctttagacctaagaaaaatctgcctatgactcttgaaactcaacaaagaaaacagaacaccccaaaaggggtgactagaacctttgttctgaattcttttaaagggttcaagtcattagaagcctcctctagattttttggtactgtagatggcaaaggggcaaggaggtatggggtggaagaaaagtaaatgaaagaacttttttttttttttaagacaggaagtaaacacagaaaccaaatgcattttttaactcttttatagttgtgaggaattttagtcaaattagagaggttttgttacccataatttggaattttcacttggatttgatcaagtcatgtaaagctggtcaaatctgatggaagaaagaccggaacaaacaacaacaacaaaaacccaacaatatgatcactgagtgttctaatggagaaaaaattaagaccagctggttgttgaactttagccaagacaaaactccaattcagttatttacctagggatgggtctgaggctgaagactgctttctaccatcctagaagcaggaaaaaagcctcaaactcctcttccctgccgagagtgagctcaaactccataaaggagttacctgccttccatcgtcctgtaaacaggaaatcttgccttccttgttgggagcaagtaaactccaaaacaaacaaacaaaacaaaagagggaggagttgtacagcaaaataaactttagttcttgactaaatttggggagatcagggattctctggagggggtgcttgcagacttcaataaattgtcctattggtttgagccataaagttagctcatgctggtaccaagcaccgacaagagatttgtcaaaggtcaggggcatctctactcagaatccctttatggttaccaaaatgtgaaccccaaaaatctgagacaggtctcagttaatttttgtgtgtgtggttgtgtgtgtgtgtgtgtgtgttttgtcagttaatttagaaagtttattttgtcaaggttgaggatatgtgtccatgacacagtctcaggaggctctgatgacatatgcccaaggtagtaggggcacagtgtgtttttgcatattttagggagacatgagacagcaatcagtatgtataagatgtacattggttccatctggaaaggggacaactcgaggtgaaggcgggacaactcaaagcgcggagggggcttccagatcataggtaggtaagagacgagtggttgtattctactgagtttctgattagcttctccaagtgaggcaatcaaatatgtatttatctcagtagaggggtgactttgaatagaatgggaggcaggtttgtcctaagcagttctcagtttggctttttcctttagtttagtattttggggtcccaaggtttattttccttttacagtataacagcctgtttcatcaaatgcctgtcgttgcccctttaggtggtttattattattttttaattcatcattcaacttgaaggtcacttatgttgttccacttgtacatgaattcatagaaaccatgagtactgggtgttgggtcagaccacaactgttcactgtgggaagcctttacttctgtctcacctctgtgccatttctcccctagatccaccctgatttcagcgggcgttcctgggtcttgtatgcactaggtgccctcaatgcttggcaactggaatgggttagcctggaggcatttaggctgtccttctacaaccacagaagagccatcactggcagagagatccttggcgcagttaagcagagatcttctcagaagagcttttgaataaatgaagttgttcagaatggccttgttaaaatgactcacttgtcaaaaaactagatgtgttggaaggctgggttggaagacaagatgtctgagaagctgtcctgctgcatgaggagtttcattgctacacacctagtctctgggtcctgtgtttttggcctccagcttacttcgtgaacataataaaggaaaggcattttctcttgtgcatgctatgtgtgcatgtgtgtatgtacttgttgtctatggctattaatttcttatgtatactactcccgttttgcgcttacccattgtattctttgaaggacacaactagatcgatgacactgtatacccatcatctctccccactccagactgagggtggagactgctacactagaatgaactgagatcacaaaggattgggggcaagttggggggcacgtatgtgggggtattaatccagggagaggggagcttgaaagtagacagtattgcccaaacttgcagtgtaatgaggactgctgccagcttctggctttctccctatccacctgtgcctgcctctccaaccttagcccccaacctttgctttggccgtaattttcccttttacctggcttgtgtagattgctatggctcttgacagtgttgagacattgtttagactcctatgaggaaagacaatttttaaaatttaagcacctctgccatgatttacaggaactaaagcaaaaggtatctgcttgctctttgagtataagaattgtggcattggggctgggcgcggtggctcacgcctgtaatcccagcactttgggaggccaaggcgggcagatcatgaggtcacgagatcgagatcagcctgccaacatggtgaaaccctgtctctactaaaaatacaaaaattagcttggtgtggtggcatgtgcttgtaatcccagctactcaggaggctgaggtaggagaattgcttgaacccgggaagcagaggttgcagtgagccgagatcgcgccactgcattccagcctagtgatggagtgagattctgtctccaaaaaaaaaaaaaaaattgtggcagtggcattgattatctatgatgtagcacttatatatattaatgtgtgtaataagtgtacaagtgtcaaatgtataatctggtcccaactgcagaaaaaagacaattataatagtatgataaaatcaagggcaggcatggtggctcacgtctgtaatccctgtactttgggaggcagaggtgggcggatcgcttgagctcagggattggagaccagcctgggcaacatggtgaaacctcatctctattaaaaatagaacaattagctgggtgtggtggcatgcaccagtaatcccagctacttgggagtctgaggcaggagaatcgcttgagcccaggaagcagaggtggcagcaagccaagattgcaccattgcactccggccttggccatgggagtgaaaccctgtctcaaaaaaaaaaaaaaaaatcacggtaaggagcaaaagggataaatgggatgatatgctgtagataggggtgggtggggagcctgggggaagcctgggtaggtgacatgaaggagaaggtcttaagaatggagaagggttccttagcccagaggctaaggaaaaagcctgagcaaaggccctgaggcaggcaggacagttcttggattaattggagaaactaaatgaagctgggacagctgggctctagcaagcaaggaagaaatacaataggagatgaagctggaggaaaagactggggccatgtgatgcagggcttgggttttacctgggtacagagggacaccactgaagaattttaactggagaattgacattttacttaggtgttttgttttcagacagagtctttctatgttgcccaggctggtcttaagctcctgggctcaagccatcctcctgccttgacctcccaagtagcctggattataggcatgtaccaacgtacctggctttattttgttttgttgttgttgttgttgtttttagttgagatacaacctacagtaaagtgtacgaaccttaagcacaccacaaagttctacatatgtataccagattaagatacagaatggccccatcactgacttaggttttagacctctgttgccgctgtcaataatggatcacaaagtgtggaaatgagaagattatttagaaatgttccatgtcagtttcgtagagaggtgatggtgatccagttgagtgtgaaaatggagagaagtgagaaatttgaaatgaattttggagagagaatacaacgtgctcatggaatgaatatgagcatgtagaaaaaagtactgattcctaggtttggagcttgggcattgtgggaaacagccatgcaatctacagagatggagaagactaaacacaggacaggtgttttggggagaggaagaaattgagaattccattctggacatgctcattgtgaaatacctatgaaacctgcaagtgaagacgtgaaatagataggactgggcccaaaatacaaatctgggagccatcagcatcaaaaggcaatgtatagatcagcaggaatggatgagattacccaggaagatggggtaaaaagcaaaagagaaaactatccaggaaaaagactgaaaaattctaatatttaaaatcagacagtggaggagccaacaaaggaaaccaaggataaatctaagaaaatcaggagagggtggtgtcatggaagccaagagggagaacatggtcagactggtgttcacaatcctggtgggaatgtgaggatatttatgtccatttggtgacatgggggtcatggtgatcttgagaagtcaactcagtggagcacagtgggtatcagcgagatttgagcaagttgaagagagaacgggaggtagttagtagagacagctttttttcttatggtgttgagatgaaaggtgaaatctagtttgaaagagaagagagacacaggctggtaactggagagtcacttggtatataaagatttttaagatgagtgatactagattttaattgttcattggtgggaattctctagcagagagggagatattaatccagaagaaagtagagaaagccaaaggaccttgagaaagtaaagggagatgagatacagagtagaggtgaaagagaagatagatacaaattttggaaggtttagatgtttggtgatgaaaacatggagttgatacctatttcttttttcttttctaaatggtacaagtaaagcagaataggggcataggaggtttaaagattagatatgaagttgtttgagggagtaagtgagagttggacacttacggacagatggatgactaggaataagtgcctgtttgagatttgtgatcatgaatcaaaagcaaagccagtcttgggtgactttccctaactatgtgctccagtgccagcatggagaacacggagtttgggttctgccaagagagctgggaaggagagaagagcaagagagcaactccgtggtggcctatgtgatccaggccagatggtaggaccagagggtgagaggagtgagaatggcatggagctcaagggaagcacagaagatgtcaggcctgtaaacagaggctccaagaaggaatttctctccccagcaatcttcaacgttagctcacagatgagggcacttgctttagaagcagtggtgacacccagtgaccactctttgaagtgcaccttcttggttttaggttgtcagcagatccggaagtgtgtgtttttttccacttgggaggcatcagagccctcaccattctctccatggttctctcttgcaggattctgtcccattggtcctggacatttcaaggggatggagaggctgctgcttaggggggtaactagaagtggactgaaggcaatctgggggctgttagctccagaccccagacctggccttctctgctaggttcctgctgtcctgagacagatcctgaatcctgggatggctttgggtattctaaagccctgcttggatttagaaaaatgccaggtagtgacataatcctcttccagcccacagttgtcctggggaaataccatcctggctgacccagaactgtgtgaggactctcttctcagcaccacctcccgaaagttgactgttgctggggttctaagagggttccactgtctccagctccacttgacccaagcactgggatctggcttagtctagagagaaacgcagattcctcccaaagtcctgtcagtcatcagaggtactgggcatgacttctgggccaagaagttgggtgtcccttagttagagggtatagggaaatacaaagaggaccaagacaggacagcccctttgcagcaacctaaggcacttttactgttctgatcaattaccctgtaccaggacatgctgtttcccttccactttaagaggttagtaaatcaggtttgagttcaaacacaagagggtcactgaggcatggggtaggtgagggaggtggtttctaaggtggtcaagaaatggaggaagactgtttctgactcacctctatccctcttccccatctcttatctcacactccccggtttgaactggactttgtacttagggcagcctggtgtcgtggaaggagcctgtgctgaacttgcagtcgggtcatcccttggccacatacctgcttccacatctgtaaaatggtgatgtggtgatggcacatggttatggtgaaaaattaaacaatgcacatgaaagtgtttcttacaccaacacaatgctttggtttaaggcattactattagatatttataccaaggcagatttcacagacattaaggaaaaagaaaaaagttttatggcaatgaaattccattagaggtgtataccaggccctgggggaactcatcagaggcaaagtgaccattgatgtcttttccaagactgagagaacacagaaagaggtgggtaaaggagaagatccaccacttggagtcagacagacttagcttcttatcctgtatttgccagttactagttgtggcatctcacacaagttcttgaacttcccagatgctcagtgtacccctgtataaagtggagataattcctccccgctgacctgttgagacaattaaatgaagtgctgcctgtaaagcaccttaaatagagtatgcactcagtgaatatggtatcatgaaaatgagttaattcaggtcatcccaaactaaatattttggacatatgttatgggccaggcaccaggctaggtggtgggtgattttgtcttataacacagcttttcagatagacagttctagttcaaatcctagatttaccacttaccagctgtagaaatgtatttaacttcttcgagccctagtttcttcctatataaagtgagggagaataatacctattttgagagattattgtaataattatataatctatgcaaagtgcctagcacagtacctggcatgaacaaagtctcaaaaatgacagtgattataattaatatgatcatgctgaaaattaaaagtaggagatgctgatgtatcagatttaaagctggacgcttaaataactttatttatagcattaaatccatccttgaaccaatcttctctgcattaactaaaatatgggatttacttccccttatacacatctacacatcactcccaaaatacttaaagcaagatatttctattggctgtaaagagggacatggtaaaatacggaaatgggcaagagaggacagctgtgttatctgtctttaaagctttttcagggaagtcttttgaagattttaagtgttttaagcctcaattgccagatgcatatgccctgtgcacatgccttttcctctagggaaaccctgttcagggtctcaatgtcccctggcccagctgccttaacttagcgcaaatgcaaacttgccctgtatctccagtggctcagaactgccctgctagctctcaaccctcctccacgctttttctttttccttgcttcctggtcctgccccctcgctccagccagacccacagcagttctgagtgtttgctgactttcactcctccaaggaggacgggctttcgctatggtctctgtccacgcccacagcttagagaaagcctgatcagtgtatacacaacccccttcctggctggtggcgctgtccttggaaagccatttactagtccataaaagggcctgagcacttaaaacaaacatggactcggtcaaaccagaaatttaaaattgcggcactttaattcaggtcaaccttcattctctttccaattctggtgccttaccctgtctgagtgtttcccatgtgcttaaccctcctgcttcccagtggctgccacaccccagcgggcctgttggtgctgggtgtgggtggagagttcccatccctgctgtagaatgacagtgatgatagctaagctttattttcactccatgcacagtgcttactgagcactaagctccaggcactgttctagatattgggggtcagcagagaccatgacaataaagtccctgcccttatggagcttatattctggaatgggagaagtcataaatatatcgcgcagtgtcaggtagtgatacatgccattcagaaatccaattcaggcaggacatggtggctcatgcctataatcccagcactttgggaggccgaggtgggcggatcacttgagcccagcagttcgagaccagcctgggcaacatagagagaacccgtctctacatacacacacaaaaattagctgggtatatgttgggggaaaggcttatggggtgcctgtataaactggctgtaaaaatatgggacagtaggttgtgaaaagccacaaaaggcctctgaggaggaaagccttcttatcgccattatgttcccatgctctgagcgagacttgctctcttatctataaacactgtgttcaagaaaaaagaccctcctttgaaacattagaatgtggccagatgtacaggctgctagttaaacccactcccactaactactctccaataagttaaagatacactgtttgagcacaaaggagattcatttaaaccaccactgctatagattacacgtatgacgcactgcctccctttcactgtttcgccttcaacatctgcttcttagttctaagtgactgtactcaataaatagtgcagagaccagagctctgagccttttacagcctccattttacagttgtccccctggcccacactctttatgcactcttaacctgtatcttctcattccttcgtcgccactggactttgggtaccgtacgggtggtgttgaggctggtctccaacaggtatggttgcatgcacctgtggtcccacttacgtgagaggctgaggcaggaggattgcctgagcccaggacgtcaaggctgcagtgagccgtgattgcaccactgcactccagcctgggtggcagagcaagaaaagaaaaattctaaacaaaacaaaacaaaacaccaaccaaacaaaaaaaaccccacatttcacaacagagccaggggcacatcaatgatgggaggtgctactttagataggttgatctgggaagacttctctgtggaggtgactcttgtgcaggtccctgagcaaaaggaaggaggagccttgggaataatgggggtaaggattccaggcagagggcattccaggcagagggcacagcaaatcactggagtagaatgagcttcacatgttggaggaacatctaggaggcctcatttttcttttaatgtcatacagtgatgagcacttaaaaaatctgtgataaaatatatacaacataaacttccccatttaaaccattttgaagtatacagttcactggaattaagtacattcatgctgttacgcagctatcaccacaatccatctctagcactttttaatcatcttctcaaactgaaactctgtgcccatcaacaatgactcccccttcctccctcccccaacctctggcaaccaccattctactttctaggtgttagcactttaaatgtgtcatctcatttcatcctcaaaacaactgtaggccatgagttttactgtgatccccattctacagatgaggaaacgtaaactgagtgaactgtctcagatcacacggccattaagtgagggaaggaggtctccattcacagtgcttctggctcaggctcctgcttgtaactgcgtacctggtaggggtttaggatgtccttctgccgcccctctgaaaacatagaggtgagttgagagagtttcatgtggattacagacaatgtgagaagcttttctggttgggacaggagggggtttgttgtacctcactggtcctgtctgcctggaaggaagaggctcttgcccagtgacgaggattggggagagaagggagagtaggtaaccaacatctgtctgctattctccttttccatctttgtcttctgagctgtctttcaaggggtatcagctgctctgagtggataagcatgggcatctttattgcttggtgtccagtcagccaggtagcactaccaccacttatttattactaggttataacacagtgctaggtgctgcaaagagattcatccaggagctacgcatgacacagatacagctatgcaacagatatcagaaggaaaaagcaaaacaaaaggaaatcaagatgagactagccaaaaaagtacagtacttgagttacatctggaccagagtaagtctgtttttgatgatggagtgtgtgcaaaattgggatggagtggctctatttgttgcagctggagccatgaccacctgtcctgttccaataaccaggttgttggaagagctatcagtttcctggtttgagtggtcttgctttggtaccaggaggtgttgagtttcacttcctgccttcccacatataagctgaaagagctcaggcaagttgccttacccttccaaggctatttcttcctttgcaaacataatcatacctactttttagggttggtgagaagatcaaaagagataaggtgtgtcggatgtctaatcagtgtttgctacatagtaagtgctcaacaaatattcattccttgctgagtagagcacgagtatgcacccagtggccaggagccaagccttcttcctccttatcatggtcagcaccatttctgacctgctggcttgtcctctctaatcactggattcagctttcaatttggggacccttgttacacactttgctgttcagacttagtgaggagaggccttagctaggggtatttgaattttggggaacaatccagcaatcatacctcttacctatttggggacaacctcctcacatgcagtatattggaaggcaggatactgcctgtgcctcacctcccacagtggaagcagacagggtgaggtcctacccaggatttgggatctagaatgtaggataatggagaggggcacttagcccctagagcctgcccagttcttaatcttggtcttcagtctcctgctgattctgtgggcaccctcttgtcctttcaacaagtcccctttcctcgtgggacaatcattttctgttgcttgcaattcagtcttgtgcaacactgaggtcttctcagatcaatcctgagagagatttcaaggggccttgggatgttagaacaatgggagacagctggctagaaaaggtactgggcacaaccttggtacaactctttcctcccagcagcaggttagtgggtggttaattggggcatgcatactgtcagctccaggcagtcgctgagctgtttattcacttgtttatatgtttgcttgttttttggtaagtgtatgtcttttctatgtgtgcttcaacctcctcaagattaaagctttcttttacatctcttgtacagagtcacagaaccccagacctggaagaggccacaagagatcatgtggttttagcttcttacctcaaggccaccaaatgtttaaccacccaacacaaatagaaatagttcgtctcagagactctccaagaaatggacacatttaatgtccccagtcacccattccaacgctggctgctttgctttgagcctattttccttacacagattgtaatgcttgtagcttcttcatgaaagcacttcagaggattataaaatcatccctcagccttcttttccctgagagccaatggtgggaaaacccagctacctacaggtccaggctcttaccaaaagggtgagctgtgagtgtgtgcacatatgttgtaggggcaatggggtagtgctgggtctggaaagcaagcctcggacaacacctgccctctcctgctgactgttgctactggtggaatgtaggctgtgtttttgagagatcttattaatttttcagggaagctggaaatctagaattataagtgagagtcctgattttttaaaatgttggcaactaatctgatttttaaaaaccatgaaccgggccaggcgtggtggctcacacctgtaatcccagcactttgggaggccaaggcaggaagatcactcggggccaggtattcgagaccagcctggccaacatggtgaaaacccatttctactaaaaatacaaaaaattagccaggcatggtggtgcatgcttataatcctagctactcgagtggccgaggcatgaactcaggaggcagaggttgcagtgagcctgaggcaggagaatagggtctggaggcagggaacccaaggctgattcaccctgaattcctagaactaaatcaaaaggaaaaccccaactttcaacacctaagcaacaaaaggaccagaggctactccctttgcaaaccaccctgcctttctgcttggcagatagaaaattgaaagtacctctgatagattgctttccaaaaccaatcagacatttgcataggagggtaactttgtaacttcacttcagcctctgattgtggaaagcaaccaattagactgattgcaggccaccacttcatttgcatggggtgaataccaagtgcccaataggaaacctctagagggtgtttggaccccagaaaattctgtaatgggggctctggagcccctatgcttgggcccgctcccaccctgtggtgtgtgctttcattttcaataaatctctgcttttgttgcttcattctttccttgcttagtgcattttgtctaattctttgttcaaaatgccaagaacctggagaccctccaccggtaacatattttggtgagccagccaaaaggtaagcccaaagtttggggtttatttttctcctttctgctccatacagggtaatctctctgtctctctccctctctctctctctctctctctctctcttttttttcctttgcaactcgggtcccttggtgagcagtgcctaagcatggaggcaactctaggtctctggctgtggcaggtgaactgaaagggttttccatgtggaggcacctaactgccaccgcctggtttgcttaagggacctgggtatttttcctttctttctttttcagtctttcagtggctgtttcctagcagctccttggtaattgagggcaactggctgggaccactctccagtgttgcctgaaggcaaaggagtgaatggggataactgccctgcccagaagcaggaaggactcttctgtcttttctggttgtggtccctgatcgctacatgtggcacagcttggggcgaactcacaagtgtttcaggcgacttaaaccttttcttatgctaaattcttcccttctcctactcgactggctaagggcaaaagaaacccactcagcctccagttcctgtcattaaagttcatggctatctctagtggaatgaagagcatgggaaattgtggccttaacaaattataagagtgctgtaagtccaggccttcatccaaggataaaaggaaagctcatagtaggccatgacctctggagggaaaacatgcaaagtggcactggtgcccatctaaggtcagagacatctgacactctaagattggaccccaaagggggacactctgggggatcctctggaccacaacctctccaaagagaacgccctcggcagaggttcttaggcctagtactaagccctcgttagaattttctcttgcagttgcgatactgtttggccccaatattgtttggaatctggagtttgctgttgaatgggaaagtaggatggagttgcatgtatccaggctttagtgctgctgtcctaagcagggttgggtctggttaatatgtgatgctctcctttggtgctgtttggccccagtgttctttggaatctggggcggtctggcctttaaaaatcaaactgctttacctgaaattttggttcacggccttcattggattacctattggggcaaacaaagtaaaactggcaagcttgtattgctatctcatggctaggattccaaggtaaaaggtattggatcttcatttatttgtgtgtagtgtgtatacatgtctagatgtgtttatttgtatgtatgcttattgttatatgttgtgtctaccaaactggcttgtaagtaaaagagccctcataaattaaataaataagtttaagcaatgttcaagttcatgtgacttaagtataactttactaaacaagctgcttttaaaattattggtaaaataaaaatagaaatgccttcagaactgtcagcatacacttttgtctggattttatatttgtctctgctagatattttgaggtgtccaggtttggcatagaaagttataaaactataaacccagccaaaacaaagtgatcttggtttgcgtgccctttttattgacaaacatgagtaatttaatgttgtcagctaaatcttgtgatttattagcaaaaatacctatgtatttaactttgagactcttacttaggtttaggtgagcacctgatgttcactggctattcaaaacgtagttaacaaggaaataactaactttaaatgatagcatctaatatctcagtttacagaagttatctagataaatgtaagtgaaagaattgagtatatgtaaatgggataaatgttttatgtaaatgttttgtgtaaattaaaatcttaaaattatttttgatgctcgttgaatatgtgggtcatttccaattaagaaagggttgtggtatggggaaatatatttttaaaaactgtgggattgttcttatctataaatgcccatgtctgatcgttcaagatttcttgctttttagtgttttgctaaagttttaggttactaaggacaaaatgtgccaaaaaagtttgtgatattagtgagaaaaataataattttgtctaattcagaagttatctaaaagttagttcaaattacagatttgaaaaagttgtttatgaaacaatgtagtaaggaaccagtaagtagggaagaaacatgtggaaaagtttagataataaaatattatttaaaacctcatagagaattggagaaatttggctaattaacattttcatagttaaagctcttagtcttgattaaagtaaaataagaaatattgtaaaaaaatgcattggcagtttggcaattcttttttaatatagttaagccgtgtttttctgtgtggagtcaaatttcatatacatacttgcattgcttcacactatgtttactgttttgcatggatagtgctggcactggagtacttactgattatgtgcctggagttaattttttttttttttttttgatggaatctagctctgtcactgaggctggagtgcagtggcatgatctcggctcactgtaacctctgcctcttgggttcaagctattctcctgccacagcctcctgagtagctgggattacgggtgcgtgccaccatgcctggttaatttttgtattttttagtagagctgtggtttcaccatgttggccaggctggtcttgaactcctgacctcaagtgatccacccgccttggcctcccaaagtgctgggattacaggcgtgaagcaccacggctggctgagagtgtatttcctgattgcaccggatatgtggtgatattggtgagcttaaggatactgaattgtatatcaggaataaaatattcattatgtgggtttttctggcggggagctctgggtaacactgctgcctcccgggtagattgagtaggagaaatttagggttggtttcctgtttgtttgtgcttctaatttttatttgtttgctgtttacgctcctctgggctttgcttatgtacgcatatatataaaaccatgattttttttagtttctagtggaaggcttttattcggttctatgaatagttattttgtttcctatgcatttctagcaagtcatcatttgttccatttgtctggaatttctaggctacctttgttgggttcacaggaattgatggaacacaccagcttgttaactttaaactaactttttggatattagattccctgatactttaagtgtattgagtatgctttcaagtcatatttttctctctctgcctaatttgtccagactttgtaaactatttgtgaatattcctttttttttttttttttcttcttgagatggagtcttgctctgttacccaggctggagtgcattggtgcgatctcggctcactgcaacctctgcctcctgggttcaagtgattctagtgcctcagcctcccaagtgctgggattataggcacgagccgccgcgcccggcctgtgaacattcttaattcatggcaatgtttgtgtttgcatatagttgagccagggtcactagggctgctcagggagagagaacccagaaacctgatacgcagcaaaagggtaagaatttcataccagtcggacctctggcctctctttctctgtgcaaaccggttgaatgaatggtaaaagattataagaaggcatgggaatgtaaatttttgtaagcctttagcatatttaataggcttcccaaaatcaaatttcagcttacatatttagttacatgggaagcattgtcaaaataaaaaaatgtttaattttcttcaggttatatttcagtgactattaatatatgttacaaaattgtatgggatttctaaaattctaaatatgtctgagtatatgctatcattcataattatgtttattatgttaacttactgtagaccacagaaataaccaaatttcttttttttttttttttttcccaaggcagaagaatttttcttagtacagaacaaaatgaaaagtctcccatgtctacttctatccacacagacccggcaaccatccgatttctcaattttttccccacccttcccgcctttctattccacaaaaccgccattgtcatcatggcccatccccaatgagccgctgggcacacctcccagacggggtcgcggccgggcagaggggctcctcacttcccagtaggggcggccgggcagaagcgcccctcacctcccggatggggcggctggccgggcggggggctgacccccccaccaccctcccggacggggcggctggccaggcagaggggctcctcacttcccagtaggggcggccgggcagaggtgcccctcacctcctggatagggcggctggcagggcggggggctgtcccccccacctccctcccggacggggcggctggccgggcagaggggtcctcacttcccagtaggggcggccgggcagaggcgcccctcacctcccggacggggcggccggccggaaggggggctgacccccccacctccctcccggacggggcggctggccgaccccccccccccgcctccctcccggacggggcggctggccgggcagaggggctcctcacttcccagtaggggcggccgggcagaggcgcccctcacctcccagacggggcggctggccaggcggggggctgatccccccacctccctcccggacggggcggctggccgggcggggggctgaccccccccacctccctcccagacggggcggctggccgggtggggggcttacccccccacctccctcccggatggggcggctggccaggcggggggctgaaccccccacctccctcccgggcggggcggctggccaggcagaggggctcctcacttcccagtaggggcggccgggcacaggcgcccctcacctcccggacggggcggctggccaggcggggggctgatccccccacctccctcccggacggggcggctggccgggcggggggctgaccccccacctccctcccggacggggcggctggccgggcggggggctgacccccccacctccctcctggatggggcgactggccgggcagaggggctcctcacttcccagtaggggcggccgggcagaggagcccctcacctcccggacggggcggctggccgggcggggggctgacccccccacctccctcccggacggggcggctggccgacccccacccccccgcctccctcccggacggggcggctggccgggcagaggggctcctcacttcccagtaggggcggccgggcagaggagcccctcacctcccggacggggcggctggctgggcggggggctgaccccccccacctccctcccggacggggtggctgccgggcggagacgctcctcacttcccagacggggtggttgccggacggaggggctcctcacttctcagacggggcggttgccaggcagagggtttcctcacttctcagacggagcggccgggcagagacgctcctcacctcccagacagggttgcggcccagcagaggcgctcctcacatcccagatagggcggtggggcagaggtgctccccacatctcagacgatgggcggccgggcagagacgctcctcacttcctagatgggatggcggccgggcagagacgctcctcactttccagactgggcagccaggcagaggggctcctcatatcccagacgatgggtggccaggcagagacgctcctcacttcccagacggggtggcggccgggcagaggctgcaatctcggctctttgggaggccaaggcaggcggctgggaggtggttgtagcgagccgagatcacgccgctgcactccagcctgggcaccattgagcactgagtgaacgagactccatctgcaatcccggcacctcgggaggccgaggctggcggatcactcgcggttaggagctggagaccagcccggccaacagagcgaaaccccgtctccaccaaaaaaaaacgaaaaccagtcaggcgtggcggcgcgcgcctgcaatcgcaggcactcggcaggctgaggcaggagaatcaggcagggaggttgcagtgagccgagatggcagcagtaccgtccagctttggctcggcatcagagggagaccgtggagggagagggagggggagggggagggggagggggagagaccaaatttctttgtataaaagtgttaacccaagtggaacaaaaattagttgagtaccaagaaaatactttgccagatttgcatgctaaatcagcggatactaaaattgtttagatatacaatttgaatgaactccatggtctaagtcaaattacctatgataacccatcagttgtcagtgctatacagctaaactggagaaacaactggtattcaagatgacgtaagtccgatgttaagcatggactcatggagaaccaggacagcagccttgcccttcctgagtccttaaagcttttgttattcaaggttatgcactccatgactcatcatggaaaagataaaataatccaaattaaatatatattggtgtgctgacttatacattgctaaagtagtttataaccaatgtttggtttgtcaaatccatattcctgggaagacaatcaaatcttcaagtacatttggctacctcatgggccatttaaacatttcaattgccattttcaatgcatgtttctggttgtaaaaaagctttcctatgcaagagggctgatgttataacagtagattattatgctacagtgtattttcaccaggtaaagaaagctttttatgggtcactgaggacaatcaaccccttcacaatctagaacccaaagattgggtcttctgagaatatctactgtaaaggctatagttacacaacagattttaaattcttttgtgaaggttacgatagaatcggctgaacagagaagtatctgtgcagctgctggcacttgtggcttatggagaaatacatcaaatgaagattatagagatttagttgtaggggattaacgaagagatttcttagttaagtgagtagattctttagcacattctttgatttaattttaggtggtttggtttatggggatccttggtatgaagtatgctccaaactcttagtattatcctcccagtagtcataataatagtctccctggtgcgctgtattatctcaaaggctttaaatgcttgcattcagccatctctagaatgtcaaatggtctcttttcaagtggaatgacaagagctgaaagaagtgcatgaccaggaggataccataacctatgaatgatgtggtgagactggaaacccaaaatgatggcaagtgagtgtggtgctaaggccttaaattttggtcacactctcacccaagtgagaacctgaccaaaaagggagaatttttttaacaaaattatgagaggccagtgttttggactgacatcatgtgctaggccccagcaaaccaaacaaaccaaaacacatagatcctaaaacagaccaggttttgtttttctcctgcaaacaggatgttccaccataaggaggtaccctctactcagtccttgttcccactgtacaaaactcactgttgttttactgtttcccagtgggtttcaagaccaaataagttcatttatgatggtggtagtgacatgaatgactaaaggtttggtcaatctctcaaaattgagaaaatgaccaaaagggggaaattgttaaagcaaattaaatatagcctgagaaggactccgtatttctatattggagtctctgtggatgaacggtaacctaacttaggaatatgtgcctgtaaaaatagctgagtcttggccaatcccagcaaccccaaatcaggccaggagataaggtacttaataaaacgtggaagtgctctggataatagtggccatttttttattgccttcttccaaacttatggaatcacttcctttgtagtaattagcagaatgtttcaattcatctccataatgaacattcctgacagcataagtatccaccccctgaagttcctgttaaatcttttaaccatattcatttcctttcacatagagaccatcaagcttcagatgatcatgtgacaaagtttccagtcagttccaagtgaagacaccacccctggccatcaggatgccacactgtctccactagacagagtagggcaagagttccatgatctccagtaggtaggaactacgccccaagttggcataaagcagttacagttcctctgcatcccataaagatttatgggggtcatgtctctcaggagagagatgaggcaggagaatagggtctggaggcaggaaacctaagggttcacctgacttcctagaactaaatcaaaaggaaaaccccaactttccgcacctaagtaacaaacggaccagagactactccctttgcaacccccactccccactttctgcttggcagatggaaaatcttttgaaagtacctctgattgcctttccgcaaccaatcctgcgtttgcatagaagtgtaactttgtaacttcacttcagcctctgattggttgtggaaagcaaccagtcagactgattgcggccaaatattcttttgcataggagtgtaactttgtaacttcactttagcctctgattggttgtggaaagtaaccgatcagactgattgcgggccaaatcttcttttgcataggagtgcaacctttgtaacttcacttcagcctctgattggttgctttccacaaccaatcagactaattgtggcaccacttcatttacatggggtgaacgccaagtggccaatgggaaacctctaggaggtatttggaccccagaagattctacagcaggggctcttgagcccatatgcaggggcctgctcccaccttgtggaatgcacttttgttttcaataaatctctgcttttgttgcttcattctttctttacttgctttgcttgtgccttttgtctaattctttgttcaaaatgacaagaacaggccgggtgcggtggctcatgcctataatcccagcactttgggaagctgaggtgggtggatcacctgaggtcaggagttccagaccagcccggccaacgtggcgaaaccccgtctctactaaaaataacaaaaaaaattagtgggacgtggtggcgcacacctgtaatcccagctacttggggggctgaggcaggagaatcgcttgaacccaggaggcagaggttgcagtgagctgagatcgtgccattgcactccagcctgggcaacagagccagactctgtttcaaaaaataaataaataaataaataaataaataaataaaggcaagaacctggacaccctccacccgtaaacagccaagactgtgccacagcactccagcctgggcgactgactgagactctgtctcaaaaaaattaaaataaaacaacaaaagtatgaaccaaaaaaaccacctctgtgggctggatgtggccttgggggtaccagtttgcagaccctgtgtcaagcggcctaggacccaatctgtatcctttgttaactgtcaccgatactgacctcagacctggaccactgggatcctgccctgaaccccgtgctttagttggcccactccagctggagcgtatgttcccttctagatcatgctcctggtaccctggactccggaaatccctgtgtaaacagccctgagcctgcttccaaggtctgacttccatccacccagggcagcctgccctgcctggcctgagtatcgttagaatgaaggatggcagggtagggggtgtgtgtttgcctgaaccagtagacccccttcagtatgtatgggatggagtcgtgtgggaatagaagcagcaagactactagcaagggctctgcatttgtactcttgcccctggctaggcagtcgccaggggtgggcctgcttctcactgacccgtgggtcaggctgtaaataagagcgaccctcgattcactctttaccctgggccaggcagtccgatgcatcctgcatcccatcattcctaataccaactctgaggatgctgacaagcagcagccccgttttacagaccgaggcacaaaggctgaactaagttgtccatagctagtgagtggcagaggcagggtttcaatgggacagtccgtggcggagcacactggctccgccgccagcccccctgcggtacccatccgcgctcgccgcctgggaccgccagcccggggcggggcgcaggcagggaccctccgctcccctctccgtctgccgcccggacgggccaccgcgggggcgcgaggaaggggtgttgggtcgccagggcccgcctcccagctgccccggccgccggggggcctggcggtgacggcggcgcctggcggcggggatttggcgcgggccgggggccgggggccggggcgcgggggcgcgaggctggattcctagggccgcggcgcttcccggcatgctccgctgcaggcccgcgcccgcgcccggactttgccatcggcggggcagtcgcgggatgcgcccgggagccacagcctgaggtgggtgagccccgccgggccgggcgggccgcggcgagtcggggaaggggacgcgggggcgcggggcctggcccggctgccggggagaggggaggcgggtgccgcagctttgttcttgccgcggggccgcgcgcccgaagttggggaaaggagtaggagccgcgccccggagcgctccggggcccgtgcggcgcgtcccgggcgggctgggggtccctccctcccggggacagagtgggcgtcctgggtggacgagcacggggaagcgggtagggtcttgggtctgttctgtccttgtggttctggaaccggaggggaagggggaaagtaagggagagagaaagagacggagaaaaacaggaaaacttactcttcagtacgcagggaagaatagagaaagaaaaacacaaagaaacgccacgcagactgcagagaaggaccacgaacacacgctccgagaaacacactcagctcacacgcactgagaagcacacttaagataaacactcaggtcacacacacaagcacactaagaaacattcagttcacacacactcagaaacacacgcactcagaagcacacaagataaacactcagctcacacacagaagcacactcagaaacattcagttcacacacactcagaaacacacgcactcagaggcacacaagataaacactcagctcacacacagaagcacactcaaacattcagttcacacacactcagaaacacactccgagaaacagttcacactcgctcagaagcacactcagctcacacacacaagcacactcggagaaacattcagctcacacacactcagaaacatactctgagaaacacaatcagctcacacccactcaagcacactcaagataaacagctcacacaagcacattcagaaaacactcagaaacatagctaacactcagaaacacactctgagaaacacagctcacacactcagaagcacactctgagaaacagctcacacacacagaaacagaaaaacagctcacgcacactaacacaaacacacacggagaaacacacttagaagcacactcagctcacacacacccagagaaacacgatcagagaaacactcagaacgcacaggaagagagaggaaaccaagtgggtggtcttggaggcctggggaccgggggaggggaaggagagacactgagaagcgggagacgggagcagcagagggaaagatgcctggaaagagaaacagagataaaggcagacataagaggaggcagaaaacacaaaggccaaaaggaggtggttaaaaggacagtaaagagaaacacacacgtagagaaacagaggcggaccctgagaattacccccctcccccacctacctctcacaaaatcagcgacacacacagaagaggcagatgccagccttctccttcttgtggtccagtgagctcgagatgggagagcagctctgtgagccctttgagaaaggcttccttggcactttaagccaggcatgtcccaaccttgtctacctggcaaactcctgctcatccttcaaaacccagctctagcctcaccactcctgtgaaagtgtcagttcccagaaagtgtcatgcaagcacagttactctcttttctgtgttcttctgcaggaagcacaggcacatggagttgaagtggtttgtcacctgtctgcctctcccaccaactccttaagatcagggtctctgtcctatctatctccaatctccagtgcatgatgcatagtagatgatcaataaatacttagtgaatggtgaccgagagcgtttggaccctccgagacatggaggatagaattaagtgcaaatagaggaaaagcaccctcctggtattctaaggactcctaagtcagagtgtctttttttcacgtggggaaattaaagcccagagaggggagaatgcttgcacaaagagagacaagcaggaggcctacaatgaaataacagtgaatatgtacttctgtgagatgcccttgttcttctggcttatgagtttaaaataggtgtgaaagaccccgttcttcagttcctctctccagaggcagctactgttatcaagttacattttatgtgtgtttgtgcctatcgatgtgttcatactaaaaaaattctgtgcactagtatatacaaatgcacggacttctttcattcttcttttgtacacaaataaaagaattctatgagaaaaagaaatagatgtgaaacagtctcctgagtgaaaactggcaagaggcaatggacactttaatgccagttctaagtttccaacactgaaactggcaattagaactctttccagaacctttacagtcttctttcttccttagaaaggaaaagtagagtgaatgtccatctcagtgtaagtggatggctttccatctcctgactgcatattggaaaaattctgtaacctccctgaacctcagtttcctcaactgtaaaatgggattactaatatgtccacttcataagattgttgttggaaaagttaacaaagaacctggtgcagagtagatcctcagtaaatacagtttcatctttcctctctttaatgggtgttcttttgtgcatgtttttatggctgcgaaaacaactgctagttaaaatgtttccttttgtctagggtttaaaaagctattttaaggccgggctcggtgtctcacgcgtgtaatcccagcactttgggaggcccgaggtgggtgcattacttgaggtcaggagttcaagaccagcctggccaacatggtgaaaccccgtctctactaaaaatacaaaaaattagccgggtgtggtgtcaggcacctgtaatcctagctacttgggaggctgaggcaggagaatcgcttgaacccaggaggcagaggttgcagtgagctgagatcgtgccattgcactccagcctgggtgacagagctagactccatcttaaaaaaacaaacaaacacaaacaaacaaacaaaaaattttagtccaactggggagcaaattcttctgagaaaggaaaaggcaaatttggggcatggcataaattttaccttggttctcttcaggccctcaggtctctgcaggtgtcgtggaggaacctagcacctgccatcctcttccccaatttgccacttccagcaggtaagacccacctgtcccactctctttcgtggcttcttgaccagatctgctctgacttcatgttctctcaagctttagcccatgaggaggatgtgaccgggactgagtcaggagccctctggaagcatggagactgtggtgattgttgccataggtgtgctggccaccatctttctggcttcgtttgcagccttggtgctggtttgcaggcagcgctactgccggccgcgagacctgctgcagcgctatgattctaagtgagtgagcctatggagggcaaggaggaggggtgggctctaactaaagaaaaagagaggaacacgtagttcagtgttgggcaactctaactcagctttttggttctaaaatggtacctgcaggtgtccttccctgtaaagacctcagagtttaagaatgttccttaagcctcccaacatcctgagtcacctccttctctgcttcctgagccaagaagaaagtcactgaatatgaacatgttcacctagcataaaagctcagccatctgtctcaaactggccacctcacttagcatttggataagccaaatcactttccagccagacccacaggaacagaaatcagatgcccacactctggccatacatctaagcaacaaacatttggttttgtgaaatcccaacttaggactgtttctctctttgcacagcagatttttttttttttttttttttttgagatagagtttcactctcgttgcccaggctggagtgcaatggtgcaatcttggctcactgcaacctccgcctcccgggttcaagtgattctcctgtctcagcctcccacgtagctgggattacaggcatgcaccaccacgcccagctaatttttgtatttttagtagagacggggtttcaccatgttggccaggctggtcttgaactcctgacctcaggtgatccacccgcctcagcttcccaaagtgctgggattacaggcatgagccaccatgcttggcctgcccagcagatttctttgtgatgcattgtatgtgaaatatattttgtaagcaagattctattttcaatttagggatattttaattgatagaccgttcagggattaacccttagtttttcttatccttctgtcttaatcctatcagcatctctgtcaagtggttcataatttataaatgcccatttatatgacccaggaaagctcttctactgaacagaatgccatggtatctcattttctaaagtaccctgttgtaaaattggaggtgtttttacttctttcacttttccagtgtaactaggaaaaggcagggatatagggatggaccaaagtggttcacaagagttattctgcagaccaggtggggagcctatgtaggtttgggtaataggaaccaccgcctctctgtaaaatgtaggattaaagggaaaatacattatagaaggatataattttgtcctgaagggatatccctaacatctttgtaatcaggtagttataccctactctttctcttggtagcttatctgactccatttcacttttcttttgttttagtgctcccggcctgcctccccaactccctgtctagccatgtgccctgccctcagctgcagccccactaggcttaggtttggatccgggacaagtggtctctgccctagcttactgactcccttacttcttttatggtgtatgtgggcctcagtgaggagaggatcagcagcggtcacccaccatgaaaccatttaacgggggccttttcttccaggcccattgtggacctcattggtgccatggagacccagtctgagccctctgagttagaactggacgatgtcgttatcaccaacccccacattgaggccattctggagaatgaagactggatcgaagatgcctcgtaaggccatgggaactgtttgcttccgggcttctggcaaatgatgccctttgctggtgtcctttgccagagcacttagctggcattcaagaacagtcactctgttacttgctgctctttcctgtgcctttagtgtgggggaaaatcagaatatgacttgaaagtgtttgtcctttccttctctccccacattttgtagacctgaacactgcggcctatagttgtgtggcaaaggttgttataaagtcaccctggtgtgctttggttatccttgagtgcccataaatttggctcaggcttcagagatgcagcccttttctttaggatctcaggggtctctccatccaacaggagcccctacattttgagaagcggctgctacttcattgccttatccatttagccatccattccctggtcccatgtttgtggggcattatgtggagggtactgggtcaggtgctgcagatattgaaacggttgaaaagacagttatagtcagtatcacagaaactgtaagagatccttgtgtacagtgcagtaggcacatggagaaggcagtgtctaggtttgcctgggttggggaggttgagctggatctcatggaagatatcacagaggaggtgccttttgacttgggtcttgaaagatgaggaggagttccccagtctgagcaaaggggaaggacacattgggcagagggaacagtctaccagaagcttgagagttatattaaagcatgactcgctaggcacacagtggagcttgctggaagagtggattgggtgcagggaggggaagggaagggaggtgctccctcctttaactcatgggctggttcatgttgacactgaggcattcccactctcagtggttggtattgggctgtgcccaccggtcagggcaagttgagaagcaagggtgggagctggagggtggtgggcccctccagatgagcactgatgacttcttcttgtttccccaggggtctcatgtcccactgcattgccatcttgaaggtaaccctctcttatttctctgtgggataaagggtagtcgaaaagcaccactgtgcgtggatggagtagaacgggaccttagaaagggcactgacctctcgcaagaggcctttccttaacttgacacttggaatttttgtggtttacttccccccctgcctggactggctgttcacagaatctcaaggctgtttcaaaggctttatttcatctggtcgtcttaattcaatgacctgtgggaaagacagcctaggtacacagccaccatttcactcctcttggagaaagctgtgtattcctgagaccgtgtagctgccaagagaaatggggtttccctgcttccccctgcacactcattttcactaacagagagttcaggcctgtatggtgagtttctttctgtatttggatttctactgtgactagaaagtcatcactagccttctttggctgtgaccgtagtcagccaaatgggacaatcagtgttaaaaaaccaaagcaggcatacttcaatctgaaggcagaggattttttctttgaaagcctggaatctttgaaaaattgcatccaatttgcattttgggtaattttatggttttagcatttgttttcaattcttgcctgttaatatcctacctaatagaataataactatactgaaatatttggccagttgcaaatatcagggtttttttttttacatcagtaacctgggtaatcacacatttatctctttgactagtaattattcaagatttcaaaagagacaactttgtcttttctttagtgtcattcagtagaagacactattaataaaacattctttaccccacctcttctttggctgtctctctcaggggatggataaatgcctagtaggaagttattatctcagagtccaggcttagttaattctgagaggctctttggatatacaaatatggctatagatataaatatggttattgatagagctaggtaggcataatggctagaagataatactatactacatttcccttctcctggccaagatgtgtcctgggcctgggttttgtctcctgtcctcatctattaggaggataaatggcacctgtggtgtgagatgaatcagctggagggagtcatattgaattggaatctgtgtctacccggcgaacctctgatcaaaggagagggcttctaagtctcctcttgggatcttaagactcttttgctaggtcacctgcccttgagtctctgtggtgggagctgggagaggggtctgggctaactcccaggtggacctttgggcttctttctgccctctactgtccagctccaagtataggtcaggtaggggtgcttccttgccatggatagaggcgcacccatgttggttggttctagcatggggtggcctggaaaggggaagcaagctctggggtggccagctctgtgggtgggaccacgaagaaggctgtagtcagtcttgccttttccctgcttttcctaaggtcctttcatcatcagcttgataaacatgctaatatattacctgagacaattgttgaaataagtgctgttattggagcatgtgcttaaagggaacaattgccctttgttcagccccattcctgagggtgccttgttggagatatttattcttgtggaagactaaaccatgagatgaaggaatagaaaaagaaagtaggtttttcccctaagtgagaaggtgaaattggagcacatgatttttcttaagacagattatttcagcttaggcttcccagagcccacaccctgcccttgatctgcggctcccaccccaggtcctctcccagccatgcccttggcttttgccacttcccacccgtttcctctcatctctgtacttttcacatctggccattaggttgggggccagctgcgatggaactcacggcagggctgatttgtctcgtgggggtggcgaggccctgagtggagccaggtcagccctcatctctctcctccctgccgcattagatttgtcacactctgacagagaagcttgttgccatgacaatgggctctggggccaagatgaagacttcagccagtgtcagcgacatcattgtggtggccaagcggatcagccccaggtgagcaattggcggcttcgaggtccccacactccctgagggaagagaggggctggaagctggggtagccgcagagctgggctcttctataaaatggtgcacaggcaacttcagctatttgtttcccacacatttacagagtgaccaggagggtttagataccgagacttctcagctaaggtgggcttccaccatccccacctgcagcatgacccatctgagagggctttggggaagcgccagcaggtgcctagtcctgaccctgtcctagaccctgccctgcagagcccgtggccgcccctcttacccagccacataccagctccccttgacacgccttcctcccaggccaacatgtcacacagatgcccacacccctgtctctgcctgaatctgtgttggagactagcttgggggacccactctggctgtgcccactgctccatccctggcccaggccagcagcctccagcactgggtgggagctgaagccatatggcattcaacctcccagattccaggctaactgcgaaatcccgtgtgggaggcaaccagcaggattgcagtcaacagctacaccccctcatttgggcttgatatcgtgaggaaaaataaagcccttttcttagagccaagggctgtactaagtttgtgctgccacctggtggctggtatgccgacgtgcctgagcagagggtcggggccaggatgttttccacgtcagccacctggcccctccgcccacccgggagggcacctctgtatgcctgctgaaacaatggcactgctgtgagttccaggggcccacacgttccttgttgccatggccccaggtaaatcacgaggaaccagccctttctctgcctcaagattaaccaaataaaaacgaccagtttcctgagttgccacgtgagttcctctgagggaatacacgacctggtcagcttgaactcagtccaggcagttcagtgagttgagagagtgggagggagataatccagggagggactcagctgagaacagttccctgccttctctggaattgcctccagtgggctgtagccacatggtcagcccctggctttataagaacccacatcccaggctctgggtgggcactgggcattccttccccattattttatttatttatttatttttgagatggaatcttgctctgtcacccaggctggagtgcggtggtgcgatcttggctcactacaacccccacctaccgggttcaagcgattctcctgcctcagccccctgagtagctgtgattacaggtgcctgctaccatgtctggctaatttttgtatttttagtagagatggggtttcaccatgttggccaggctgatctcaaactcctgacctcaggtgatcctcctgcctcagcctcccacagtgctgggattataggtgtgagccaccacacccggcctccttccccattagttttaaagattctgcactatggtattcactagaccctttgtcatgctttttgtgccttctaagagccacttagaggccaggcagattcctgtgatacaggttacaaggcagcactttcaggaggttgaggtttctgtgtgagcctgggtgagtaggatcagcacgggtcctaagatgagggtgtggcattgtccagagagtggacctgttctggtgctcacaggcccatcctaaagagtaccttggactacttctagaatgctccgtgccataattcagccagggtcctgctttgtccttttgccctcacacttctttctccttctggccatgttttgtccccattgtttttcctgctccatttatcccacacagtgtgttgatggcctgtgagtctcgaggaggtggcttcagctccagggcactagagaaaggagctggctgagataggcgcggagggtgactgtgtctctgcatgtcctcaccggctccacagccgtgaataagagtgtttgaggccatctttttttcaagtgcttttagaaatcaaacaatacatctttattttttcttcctatcgagtgttcatgagcaaagatttggagcaaaaccttgtgccacgcaaatcagaatgaattgtagttctgaacttgatttaaaaaaattaaccacagggtagaagaaatccagtagagcagtgtgaagccaaatgaaactcatggccttctttttcggtgtcttacatacctttagctttgtatttttttttcctgaatacaagagtaattaatgcttataaaaatgtgaaatactgcagacatacatgacctggaaagtctactccctcccaattgtaggaaaaaaccactattaagtggtgagtgttcctccagatccttcccaaccccacatttcagagcttttgtttatctatttttatgcaaatgacagattgagctttacatattatttggcaatttgcctttttaatatagtagtaatcttgaacatcattccatatgtatgactgtattttaaaaaaccattggaactgaaacaaaactagaaaacaaagtagtctctgcaaagactgaacctgaagtctttgtgcctaagtgtctgtctgagaatgcagaagcaattggagaaagaaccattaaagaccaggtctggaataccaaaaaagaagaactggaataaagatagaaaggaaggaaggggccaggcgtgtggctcacgtgcctgtaatcccagcactatggaaggctgaggtgggtggatcacctgaggtcaggagttcaaggctagcctggccaacatggtgaaaccccgtctctactaaaaatacaaaaattagctgggcatggtggcgcgtgcctgtaatcccagctacttgggaagctgaggcaggagaatcacttgagcctgggaggtggatgttgcagtgagctgagatagcaccactgcactccagcctgggtgacagagcgagactctgtctcaggaaaaaaaaaaaaaggagaaaaggagatcaggaaagtgaagtactgaacaccttttgcctccggtcagggtggatgatgttgtgaagtcgatgtaccctccgttggaccccaaactcctggacgcacggtgagaccaggggtgggtgcatgttcggtttttcatgcagaggtccacaaccgttttatcagatctgtgaggctggctgactggcttgtgtagggagggtggctttgcagcctccttaggctgcccgggccatgcgtgccatttacttcagtgagcggcgcctgactgggtgatagaggccagtcctctcctgaaacccaggagaagaaagaggcagtcttagattttaaattgttatgattagacttccggccatgttacatcctaactgtgccttcccttctaccttttcccctttccccctctgatttttgtaccccagaagcagacatgccttagctgtgagtgccacccagttgggcggtggggcagtggttcccagagcagtgagaatggaggtgacaggtcagccacagctgtgctcacctgccaccagacatgcgcatacacagagtgtacttagccctatgaaattgttatgttcctataccagatgcaacccatttaagaaatatagattctttcgtgccttggatttatatgactgtgtcatacacatgtaacagttgccagatcggcagtgggtcacagcgcttcagctttggtttctctgccccactcctactgctgccgagctttgtccgtgggttaataatctgtaatgtattctcaaatgcatcatggtactaaccatataaaaggtattctacagtgaatctttcagcactgaaaaatctactcctcactttggttttcagttacatttttttttttgagttggataaaccagccctgggccttaccaatttgtaatcaataaggaatgtttaagtgagggtgtgtctgtcctatgtttcagtgggcagcggttggggaatatgctcatctgattgactatatctgaactgtttcacaaagcgctctttggggagatgttaataggtgtgctgcagaaaatggcttccacagtcttaaataagcttgtgagagacagcctgttatattctccttggagctttaccaggtacatctcagaaggctctgaggcaggcttcagttaaccatgtttaacccagccatctccaaatttatttgagcatggagccaactttaaattgcatacctaccaacatcctagggaagggtgtgcagtttggggaatactagtcaaaaagtctatctatttgggcttttgtgcaaagtccctcatttcctaggaaacctgaccctattttctttttttccctaggacgactgccctgctcctgtctgtcagtcacctggtgctggtgacaaggaatgcctgccatctgacgggaggcctggactggattgaccagtctctgtcggctgctgaggagcatttggaagtccttcgagaagcagccctagcttctgagccagataaaggcctcccaggccctgaaggcttcctgcaggagcagtctgcaatttagtgcctacaggccagcagctagccatgaaggcccctgccgccatccctggatggctcagcttagccttctactttttcctatagagttagttgttctccacggctggagagttcagctgtgtgtgcatagtaaagcaggagatccccgtcagtttatgcctcttttgcagttgcaaactgtggctggtgagtggcagtctaatactacagttaggggagatgccattcactctctgcaagaggagtattgaaaactggtggactgtcagctttatttagctcacctagtgttttcaagaaaattgagccaccgtctaagaaatcaagaggtttcacattaaaattagaatttctggcctctctcgatcggtcagaatgtgtggcaattctgatctgcattttcagaagaggacaatcaattgaaactaagtaggggtttcttcttttggcaagacttgtactctctcacctggcctgtttcatttatttgtattatctgcctggtccctgaggcgtctgggtctctcctctcccttgcaggtttgggtttgaagctgaggaactacaaagttgatgatttcttttttatctttatgcctgcaattttacctagctaccactaggtggatagtaaatttatacttatgtttccctcaagtgtgtagttattgagtcaaattcatatgcatggtgtattgtgggacatacttagatggaaggagagagcctaagaatcctgaggatgatttctgtgtatgcctcaaaatgagatatttaggctgggcgcggtggctcacacctgtaatcctcgcactttgggaggctaaggtgggtggattgcttgagcccaggagtttgagaccagcctgggcaacatggtgaaacctcatctctacacaaactacaaaaattagctgggcatggtgacacgtgcggctgcttggtaggctgaggtgggaggatcgcttgagcccaggaggtgaaggttgcagtgagccctgattgtgccactgcattccagcctgggcgacagagtgagaccatgtctccaaaacatacatatatataaaatatatttaaagacctcttggagttcaggcagaagtgaagatagcactatgaagtagtttccacattaacaatagcaatgacttgaacgatgtgttccccctttcttctgatattaatatctgttcattttgcaaacattgaaagattatgaaagctatgacccagaatcacaattatataatttggatacatacccaaatggcataatttctgtcataagcctgtaggaaaagcttgaattcttcacttctcagattctcagagccagcttgctcttgggagaggggcctggtataggggctgcccaggttcgtagcctatgctgtcaagcatgtttggagttgcacatctgttcccatgtcattttctctgtctaactgaagtcagaaaattcctcagctggattctggggaaccaggaacccatattcccaaatccaagattgggacctggtttgtctttccatttgggcacatttcattctttccaggaaaacaggccacttccaacctgcacaatgtacaccaaaccacagaaccacagctgggatatggagtcaggagagggaagctggagctcaactctcatggactaaaggatggattctggatgggctccaggggacaccttattggattggtggcttccatcaactcttaaaaacgttaagtggtgaactttcccgtcctgtcaagctgtgaatggggaatgtatacaaagtcactttgacttttctatttgaggcctccacagtaaacatccagagtcatcctatttttgtctttttacctccctttcagaacctgttttcgtaattagactggaaagcaattcatgctaagtttgcaatggctgccacagttgtaagtgtcccctgcattttaacctgcactagagccctaagccacagagaagcagttctgaattggtatctcaaataccatccacctggtgtgggtctgcagggtggagagctttcccagcacccctgaagcaatgcccaatgtcgattaccttctctgagtcctggcaagtcctggcacattggctttctggatcccttagatgctgccctttctgttgtgaggagaggttgccgaagatattggaggtgtctgctggactgtaggatttctgatcccactgctgtgtagtttttttttctagtgctggacaagtaagaagcctctggataaatttggtgttggtggctgatggttgaagtggaagcagtctttggggtaggaggcaatgccactcctctaggcccttcgggagttggctgaagttacttcctcccttggaaggggctggttagtgagtgccagggatctcaggactgtctctgtgccaggtgtggtttcccaggcaacagacacattcctaagtgcctagttctctagcgtctgtatacatggtagtagagccttccttccatgtctctcttccctctggcctggaataggagcattagactcaaattctgatgaaaaagaaattacttggagatagagattcaatgtgaagagaacaagatatttgaagtcagaattaggtttgaatttgggctcagtgacttacagtgtgagcttggtcaagttcttaacattctggtccttagcattctcatctgtatggtcaaggctattgtcattgggttggtatgtcaacaagcaaaacggtatgtgtgagctgcccaattgtgggcctggttctgattagccaatgttaacacccttctctccacagcttcccattctctgatgccgctgacccagatggcgtcacctcagttaccatggcttggtccaagcagtgacttctgttcatgggctctggaattgagtggccaaaaatctggaatccctacagtagggagagtagccttgtccctgccccactacaagtctgttcatatgaagacatacaaagccgtcgcctctaatcagtgttcaaagggtcgattgtgcaactcacattcctccagagaaattcccccagcttgtgagatctccaagagggaacacgtattcctggcatccaacttcccctggtgctccccctgacctgcctcattccaggagttccctctccagagaccctgtgtgcccacacgagcagacttttagaaaatggcctacagttcaaaggccctgcattgctttatggccttggaaatgtggggaaagtgtcagatgaagaatttctatcctcctcacctcctccctgtctccaataaatgcataccaagagctttctgtggaagagggttcgtgctagatgctggagctatgaaacaaaaggcacaatccctgcccttaaggagcgatagagaaatgagcaactgctggagccatgactgtagccagtgctgtgatggaggggaccacaagagggactgtgggcacacagagaagggacagggcaggggtggggttgaaatagggcagagctgctgcctgaatggagacttgacaaagaaggagtcaggcatcagaacagaaaatggtcccagctactcaggtggcaggggcaggaggatcgcttgagcctgggttgggtggaggctgcagtgaatcttgatagagccactgcactctagcttgggcaacagagcaagaccctgtctcaaaacacacacatgtacacacacacagaaagtgccgggggaaataatatggttgtgctgtgtttgttctggtgggtcttactgtgtttctatgagaaaggctgatgagcaattttcagaatttgaggcaaaactggttcttcctgtttcatcctatttgtatttttattatcccaattttgcaggtaaggagaccaaagcagaaagatcagtaaccctcctggagtctcacaattaatatgaatcagagcaggatcttcaactcctcaacttgtgtttttaactggcacatcttcctgcctgggtgcagcaggtgggaaatccatcatggaaaggaaagaacagacatgagagtcattccattctcttccagttcaaatctttttttgtgaaaaaaatggtagttgtgacccatgaattaatttcacggcccactaattggttacaacccacaggatgatagaacataggtactaaaatgagggctggggcatgggtgaggtatttcctctccttccaaaatgacttaattttatccatttaaaataaaatttgcatttaccagaatagtggcaaaaatttattgtgcagaatagaataattgatttattacatgaatgattagttcaagagtcatctgttgagcatctgcactggattaggcccagagatgcatgaatgaataaaaagataatgcctctcttgaggtgcatataatctaaggtggaaagaaaaccataaagaggcattttcaatacagtgtggtaagggctaagggagggaatgtgtgtgtgatgacagcgcagagcaggaccaccaaacccaggtcatgagagtttcctaaaggtggttacatctcagaatagtctgtcgaggagtaggtgttaggagaagacagggtggggttgggaaggtggaagtggaggacagagcatccaggtagggccatcttgcagacatgacattccatgccatgctcaggacatgttagctgcttcagtactgtgagtgtcaggtgggagctgtggcatggtaggaggtaagcctggggaagaaggtgaggatgagactctggagagtctcataggccttgctgaggtctttggactttttctctaggtgatagggggcaattgaatgttgaaaattgttttcttattttttttcctggggcattagcaattgatcactgcaccctcaccagcctttaatgttttcctaatttgataggtgaacaatggcctagcattgtgttaatttgcatttccctgactactggtgcagttagacatttttttttcaggtgtttattagctatttgtacatattcatgccctttgcccatttttctactgggattttagtattcttattgacttatatgagctctttatatattaaatataacaaccctttgtcatatttattgcatatattttcacccagctttgtcatttgctttttagttttgtttacaatggtttctgatgtccagaagtttcaaattttgtgtagtcaaatttattgattttctttttgttagttattccttccattgcttttatactttcttatctagagatcaaataaatattgagagctggagctatggaacaaaaggcacataataatattcacatgttaggtgtagtggcagaaaaaaacaacagggtagaaaaaacccaaaccttcctttatccaccccaaatccaccccaatccacccaaatcctgtgggaacagtcacaggtcaaagaaatagacaagaatggtgaggagaggaagggaacaccttgaaggacgagtaggagctggtcaggcatacagggtgtgtgggagtagcacagaaaggaagctgcatgtcccaaggtagaggatgaagagacaagcatgtctgagtgcgggggatgcagggcagagaaaagccacacaatttctgctctcatgagattgtagtctggtgaggaaagacatacattaaacaaaatgttgcttaaataaatgtaaaatgaaaactttaaaagtgttgtaagaaaataatttgaatcttatgagagattataagggaaactgatctatctagatgtcaaggaaggcttccagtaagaggatctttgatatactatctggaggataagtaggagtccagaggtgaagaagtggatgtatgagaaactgtacatgtaaaggccctttggcagaaggacaagaactgagaccaggccagtgtgactgaagagcagagcagacagggaagaaggccaggtgaaaatgggggagggactgaatcatgccagacattgcaggccatgtgaaggactttggtctttctctgaagagtgatgagaacccattcaaatggtttattcagatctggtgggttttgattagaggtggagacataatcagatttgtattttgagaagatccttttgccttctacgtggagaaccaataggaggaggctggagcagataggagctgcctgatgctgctgcagcagtctaggtgagagatgatggtagcttggtctaggcagggagaggaagatggaaaggggagtggagcatttgagaaatgtttaggaagtaaaataaatagaatttgggtggattggatatgggacagtgatgcaagataatagcgtgccaagaaagactcctaggtttcaagtttgcacacttatatgggggtgacagtttggggctaggggtcactggtacaggaagcaccagaagaggatcaggtttggggacgagtttaaagtcatccgttttggagttgaagagtttgcggtgcatttgagatatctgagttgagttagagatataatggttggagctcagaaaagactgggctgaaggcttttcattaagttattaagagagttttggccatgggtgcaatcctagggagagagtgtggagtgaaaattgcagaggggtgtgagatactcttaacatcgaatatgatactgggccagttcaaagctctgtactgttatgttgatggctaaatgaaattgcatatgcccagttcctggcacacagtaggcactcagtaaatattaaatatatctcctttttctcctttgtttctctgctccctttattctatttctctctcttttctggctctatgtattacagccagagactcaagctgacttctttcaacttccccagggtacctagtgcacaaacctggcatacatcgctctcctccaagacccagcctgggagagcctacctcttgagagctgtctcaagctgaagtaagtttagttaccaatgatcagtgctcagagagccagtttttttttttccttcccttccttccttccttccttccttccttccttccttccttccttccttccttccttccttccttcctttcatttgttcttttttctagatgggatctcactctgttacccaggctagagtgcagtggcatgatctctcagctcactgcaacctccgcctcctgggctcaatcaatcctcccacctcagcctcctgtgtaactgggactacaggtgcatgccaccacacctggctaatttctgtatttttttttgtagatatggggttttaccatgttgcccaggctggtctcaaactcctgagctcaagcgatctgcccaccttggcttcccaaagtgctgggattacaggcatgagccactgcccctgtccgagagctaattttcttaggacacacagcaacttctactggatgatcgcaccttagaatgataattatgtcaccttgcatttccagaacattttgtattttttcagagagttttcacagtgattatctcagttgttcatcaaaggatttttcattatgaactgcatttgcgtattttatttacctataatcctttccccgctgctgaaacaatagcattctgagcaaacatgcatatggctaacaaatccactcttattcataagatttctttttcttgttttcccattttatttttaaatcatgatttttatcttccaggccatattctttcacacatttttgttattctcaaactcatgatttcattctttctcttctgatttggcacgtgccctcttcatctcctctcaccgacgagggttctggcccctaacgcccattgttccagtacattcagagactcacgtttctgactcctctccacctcattcctctctgaggcaagtgctgtttattctgcattgaagcttcatattacctttaactagagatttgttatgcaagacaacctcatgatcgtgcagcctcatgcagatttttcctttgccctggcatcttgaagattcttttttgcttctcaaatcacatctttttttcccattcttcatgacactttcctgatttccctttctgtattcttgatctttatcttctgctatctgaattcatcatctcagcaaacatgtgtcaagcaactactatgaaccaggctctgtgctgggctctggggattcaaaaacccatgacctgatcttgaccttgaagtattcacagcctgcaacagtgggtctcagacctggtggcacgtttgaatcgccgtctgaagaactttaaaaaaatactaattgcgaagtcctagccatagagattctggtttaattggtattgagtgagaccctggcattgttatttttaaacagattctaatgtgcacccagggataagaaccactcactagtctaatggatgaaacagatgtggagacaaatgattttaatacaatgtgaaggcagaagtaagcacagagggcaggaggagaacagaagagaaacccgggatccagcttaggaagtgagaaagccgggcaggttacccagagtggatgactcagtgccccgtctcatcccagaagaactttttgcagagcccacctttcctcccattttccaatcaaataggagaaatgaaagtatctcctagagttaccttttatcttttttttcccccagatgcagtgtttattgtttgatttgtagtgcttattgtttttggagtttaaattctccctgcatgtctgatttcagggtaccaacatgatgccattgaacatgggacgtgatgtgcataatcagctcttgggaaccttcaggtgtgggctacagcacctcactggaccgctgggttcctagtagagtggaggaagtgttcacttagccacaactttgcttcaccctggaggccaactgaggcatgttagtataccctctccctgtagttctggagtgaggacattggaaagctaaacagtggtgcttgattcaaggtgcttgatctaatttctgtggcctttgtctgaagagggaggaataagaacgtgtcaacctggaattcccagactggctgattgggtcacatttggaaagctgctgtgtgcacatctgattatcctgcacctaggactatgattcatttcttctttctcagaacgtgtatcagtttgttatattgattagcctgattgtctgaatagtgtctttctgtgtcaaatctatgaaagtttgaaccctatatgcttttgctgaatactgtatttccaatacctagtaattatacctagactgacacatagtgggaatttttttcttcaagtttaagtgaaaatttatttatttttttaaatctccaaaagcttcccattgtttattattatttttattttatttatttattttttaatttttaaatttttttattattatactttaagttctagggtacatgtgcacaacgtgcacgtttgttacatatgtgtacacgtgccatgttggtgtgctgcacccattaactcgtcatttacattaggtatatctcctaatgctatccctcccccctccccccaccccacgacaggccccggtgtgtgatgttccccttcctgtgtccaggtgttctcatggttcaattcccacctatgagtgagaacatgcggtgtttggttttttgtccttgcaatagtttgctgagaatgatggtttccagcttcatccatgtccctacaaaggacatgaactcacccttttttatggctgcatggtattccatggtgtacatgtgtcacattttctttatccagtctatcgttgatggacatttgggttggttccaagtctttgctattgtgaatagtgccgcaataaacatacgtgtgcatgtgtctttattagcagcatgatttataatcctttgggtatatacccagtaatgggatggctgggtcaaatggtattaccttttatcttaaggaatagaagagcgattatgagcataggcctgggatgcaagaaacacattcaaatcccagctctgccacttactgtgtggccttacacaaaatcgtgtgtgtgtgtgtctgtgtgtatgtgtgaattgacggagctaatgtatgtaatgtgcctcacccactgctttacattcagtagatgctcaaaaacattgtagccatgggccgggtgcagtggctcacacctgtaatcctagcactttgggaggctgaggtgggtggattgcttgtggccaggagtttgagaccagcctggccaacatgatgaaaccctgtctctattaaaaatacaaaaattagccaggcacagtgatgtgtgcctgtagtcccagctacttgggaggctgaggcaggagaattgcttgagcctgggaggcggaggtttcagtgagctgagattgccccactgcactccagactgggccacagagcaagatgctgtctcaaaaaaaaaatgtagctatgtacacttcaaagtacacaaacacacaaatgcacatgctgatgatgctcagtgtgtcttcttccagcagcaagtactcagatgactttccttgtttgccctgctggcccatccctgcttgggggagatacttcacttggtctgtctccatgtgatctttgaaggcaggtgtctgagcctcagctcccatgtgcctgctcctctccagtcccttcccttgtcttccccagttgtttagcatcttctttacctccagtgttcctgccaacattggtccctggctcattgtctggtctgaagcttatcatggatctgaatgtgatggttctcccacagctcgctctgtcatccctgctgtgttttcccttatggtggctgagtggtccactgccatcctgcatggcacccccagcctcacctgctcctgccagtgcttgtggtgggacttgagctggagctgcagctggagggctccagcttgccatagctgcccactgtcctttctaaatgtattattattgccttggctaggcctctccttttcctgggacagcaatctgaggttttcttggtcttgaggccatatagagaccttgattgccagactctgactccctggggagtgctttcttaagtttatagcttggcccattctggaatgatgctgtagtcttcctctaaagcctgcctcccactttctctgagccttcccttgctcctgaaacagaacgattacactgttctgatgtccttactttcttatttctcacctttccctgtgcattctctctcaaccctgtggcagccctctgacctccttgcatttctggcgaaggtctatgcatggcattgccttcctgcctgccactccgtttgtctctcctaattactgggattctgtttatacagacttctcactttggctctttggttttttaaaagtgatttctgcttcaattcagcactttaccatttctccttctcctctttgttatttacttctgcaaatgggattattaattttactctttgaaacttttggctttgtcctcccctgatatggcttggctctgtccccacccaaatgtcatcttgaattgtagctcccataattcccatgtgttgtgggaaggacccagtgaaagacaattgaatcatgggggcagtttcccccatactgttctcatgatggtgagtaagtctcacgagatctgatgattttataaggggtttcccttttcacttggctctctcattctctcttgtctgctgccataaaagatgtcctttgctcttccaccatgattgtgaggcctccccagccatgtggagctgtgagtccattaaacctctttttttttttttttataaattacacagtcttgggtatgtctttattagcagcatgagaacagactaatacatcccctgagagaggcttttctcttattgtctttccagatgacccagccccatttgtcttatgaagggtgaataagactccttttctcttcttttaaaaatttatttttattgatatgtatattagatatacatacttttggggtacaggtgataatttggtacattcatgtagtcaaatcacagtaattgggacatccaatacctttgttaaaaacttcagtggaaataaatttaaaggagtttaatcaaacaatgaatgattcatgaatcaggcaacccccagaatcacagcatattcagagagactccaggggtgccttgtggtcagaacaaatttataaaaagggaagtgaggtacagaaataagaagtgaggtatagaaacagctggattggttacagttggtgtttaacttagtccatgagtagtttaacttagtccatgagtagatgaagtgtggccactgggattggccaagactcagctattgttacaggtgcatactcctaagttaggttttcaatcttgcctgcctattaagctgggttacattttgtccacaatcactcatatatagaagtatggagtccttctcaggccatatttaatttgctttaacaccttaaatatttatcttcctttaagcgaggaacattcaaattattctcttctagctatttggaaatatacaattgattaatgttaactatagtcacactgctgatgtatcgaatactagatcttattttttccatctaagtctatatttgtacccatcaatcaacttctcttcatgcccctctccctgtacccttcctggcctctgggacatcctttctcttagttggtgttgttgttggactgatcactctgtcctgacctggtaggactttgctcattccccatctcctctcctcaggagaacacatgccacactcatcttactggagtctgtggattccttaaaacagcctgggagatctggaggggtagcaactattattactggtttttagttaggaaaatgagacttagcaaggaggaaacaggcctaggaagggaaactcacgctccaagctcatgcagccagtaagggaagaactgggaaagaatgcacaccaaggaattcccagttcattgcatggaggagaggaggtgagtgtgctactcagagcccctaacatctgtcatcctgtaaaagctataataaaaagtcataaatgcataaacagtgtgaaaaagttcaaaggtaaactcattaagttcagaaatataaggggtatgcctagggccaaaaaaaaaaaaagtcatctaattatgggacgcactagcacagtgtggtagaatgttaaaatagctgagaggagcctgcagagacaggggccttgggtgactgggtccctactgcatgttgggagctgttggaaacaccttacatgcattattttatttaatcttcacaagagatgaatgaccttatgaggctggtgttattacatccaccaactcaaggcgcagagaggtcaaagcacttgctcacagtcacagagtggcttaggagctgatttgggatgagagaccaggtctctcaaattccattttcatgtgcttgcctccatgtcacgatttgcccagtttgctgaaagacagacctgcacgtggcccctacagaagagatacatctctctttgggagaggttggcattggggaggaaagccctgcccgtcagccctcctcctggctgcagcgccctggctagctgtacctgtgggtgtgactctgtgtagctgtctttctcttaagtatacagagaaaaaaaatttttttccgtcgtggggataaagttcaaggaacaacctcaccaagaaggtggggctgagtgccgcccagctggctggctgcctgctgtgaataactaaccagaacacatggaatatggcatgatacgggccaagacagagcaaggacccaagttcatgtatgaccctcatcaccctccttttacatgctcccagcgccatggagagcttgcagttgggagttaagaggggctactctcccttcccttccaggtagaggttaagattcatgtctcatagtcctttattcttcggggttttcttgagacttatttgagtcaaatacgtgccaaatgaggacctgtcctgcttaagtactggagttggaggagactaaatacctcctgcttatccctccctctgcttgcaacaccctccctgttcctcagttcttcctccaggtacatctcaaatgttccctgttataagaatagctaatatgcttatacactaatacttatgtggcagatatatttattcatttatttaatcctctcaacagccctacagcataggtactattatttccattttgcagatgagaaaaacaaggcacaaaaaggctaagtaatttatccaaggtgacactgttagtaaatggcagacctgggattgtatcccagtctatttcaagatattgaagttggcagcatggtgtggtgaaagagcctggattgggttcaaatcttggtcacaccatttaaagctgcatgaacttgggaggtggcttagccatcttgaacctcaattttctcatatctgaaagggaataatatggtcgggtgtggtggctcatgcctgtaatcccagcgctttgggaggctgaggcaggaggaacttgaggccaggagttagagaccggcctgggcaacatagcaagaacccatctctaaaaaataaataaatagataaattagttgggcatggtggcgtgtacctgtagtcctagatactcagggagctgaggcagggaggatggcttgagcctggaagttctaggcttcagtgagctctgattgtgccaatgcactccaacctgggtgacagagtgagaccctgtctctaaaaaaaaaaagggaataatacatcaaacatcatataattgtttgtgaggtttaaaaaagataaataatgacattattgaacatttgaaaataagtaatacgtattggttctcttccgactttgaatcaatcaattatattaagcataaagctttagcatagaatattataggatagaatgagatgtcagatccggaaaggatcttagcaatgacctaatccaatgcattgtctgaagcgtgaggaattattgacacttgcccaaggccagtcacatagtaactcagtaactgtgacaaagattgtgagttgccttttctaatatcttgtctcccttcttagcaatagcatccctggtttttagctgggttcatggtgtcttggaaaaaggctacatttcctagctttccttggagctaagtgtggccatttgactatgtctggccaatgagatgtcagtgaaaaagtcaaaggatactttctggaagtctccttcaaaagggagaatgctggttcttttccctttcttccatctttttgcttagaaggcagatctggtaactgaagctcttgtcatcttgaacaggagtatgtcatagcctagggatgacagtgccttcacactaccatgagttatttacctctagatttatttcatatgagacagaagtaaacttctgtcatgtttaagccactgttggttgggtttcctgttacttgcagtctaatctaatcctaacagacagcattagatacggactagaaacaaggtcaataaatgtttattgagttgaggagaggtcccccagagaagcctggcctgtctttttccatctctgcaggtatttaggagagaagctggggttttcacaacaaaacatcttgaagccctaaaatgacttgtcatgccttgtgagtgggggtgggcttatctctggaaaccagggctgtggctggaggaaggtgcccaggtatgggtggtctggcactgtcggtcttctctctcagccacagagggacaaacctgtggacagagctatcctttggttccaaatgtgggtctctgcacacggtccgtcccctaagctctcagctggtgggctgaagaagcctgaggaagccaggatctgtgagatggcccgattaccttgcctgttattcactttgttactggcatgttttgaaattgatgatttcttttctttcctcaaaaaacttgttcctccctttgctttgcttttttttaaattaatttttctgtcatgaaatatttcaaagatagacaagaatagaaaagagcataatgaatacctatttacccacgattaagctt

SEQ ID NO: 22662 - DNA, 164429 bp, Homo Sapiens
gaattcctgacctcaggtgatccacccgccctggcctcccaaagtgctgggattacaggcatgagccaccgcacctggccctgaaaaattctttaaagaaactatgcaggactgtacatctctcctctaggggacggtcttggaaactgagttgttatgacacatttccaagatggccaccattttccatctactccatgccctgcctaggccaggatgaaccagagatggagggactgtccaagatcccagcctggtgactgtctctctccagctatggctacctgccttactgacagacccacaggaccaagaaggtcaggcttttgggggcagcagaccagccacctggacccaggggcaggattgtgagctcaggctcaattatttaccagacccaagcctccaagacgacccatggcctaactttataagaagtcctggggctttctgaatccagagggaaggtcaacctgccaagtcccaattctgtacacaccaagatagacagtactaaacacagaaggtagcccatctcctgagacacttttagctaaatttcaagcattcaatagatgacaaagattcaactttctataacaactctatagcatcattagactggttttgcagatgaggaaaactgaggcctcaaaaagcttaatttccccgaagtcaacgagttaaaatggtggtgctgtaactccaaccaagtctgctgtcaaactttctggattttgttgtggaggcggtaggaagaaaagcccatctgtgtttcctggtagcaagcctgtccagggggccttgctggcctcaccaaagggcacacgtacacccactagccccatgaaagagatttgcagagatgaacctatatcccccagagagctagcactgtatcagtgaaggctatccaccaactggccagccagctctgaattttctttttcttttttttgagacggagtcttgctctgtcgcccaggctgccaggctggagttcagtggcatgatctcggttcactgcaagctccgcctcccgggttcgtgccattctgccgcctcagcatcccaagtagctgggactacaggcgcccgccaccacacccagctaattttgttttttgtatttttagtagagacagggtttcaccatgctagccaggatggtctcgatgtcctgacctcgtgatccacccacctcggcctcccaaagtgctgggattacaggcgtgagccaccgcgcccggccttgaaatttttttttttattattttttttgagacggagtctcactctacagcacaggctggagcgcaagggctcgatctcggctcattgcaacctccgcctcccgggttcaagtgattctcctgcctcagcctcctgagtagctgggattagaggtgcacactaccatgcccggctagtttttgtatttttagtagagatggggttttaccatgttggccaggttggtctcaaactcctgacctcatgatccgtccaccttggccacccaaagttctggcattacaggcatgagccactaagcctggccagctctgaaatttttatggcctatttattctctgcttgctctgagcttcatgattaacaccatggttcactgttagcttcctttcttttactgccctctgccttgtcaggctctggcagcagcaagggcagccaacccccctggcccagagctcctcctgacggtgcacagccctgacttcatcctgtggttcctccccctccagtggaatcagaagagtccacacaagagatgtggcccaggacctatctgccctactttcccaactattttaagccagaaagctaaattttgctttcaaccagctgaacaagatcagactatcccagaactgacaggggtgcccactccacccaataccaaccgttaactggaagagtcacaggctgagctcaccagtgcatgccccgtgcctgggtgatacagtcatttccagacggctggcctaggcctgggtctctgggcatgtggccaccacaccacagaccacgtagcagtgattaaagatagcagcaagtaagcaattagccttgaagtaattattctaattagtccaatcagagtctgttttaatctgccccatgcagccaacagggaataggagaatgaatgacagataaagtgatatgaagataaaaaatatttccctaaagtacagccttaagaggggatccacccaggcctaacatgggaaggttacaaaaaacaactgacgactaggtttggaaaggagtttgaagcacttccagaagattctgtgaggccttgttctaaatgcccaggtttagacactgctgagtcaatgtttgtgacgcaccaacatccatgctgatcactattaaatataaaattgtattcttgccatgcggtcttagaggggtacagataccattgccaccaacaccaactgaagtctaagatgcctactactagaatccctccccatctgcaccgcaccactgttttcaccagcccctcccttccaatctgcagctttactgctcatcacctctgggctaggatctgtaccaggaaaagagaaagcaccacttcttaccagtttatatgcaggatttgacgacgggcactactaataggcaggtgttcacccacctgcataccaaggtaagctaagtatgcaggtgcaagaagatttaattagtggaagggtccagaccctagagcagtgactctcaactaaggattctgcacttcccctgcctcggcatttggcagtgtctggacactttctggttgtcataaaaaacactattggcacctagcagatagaagccaggaatgctgctgaacagtctacaatgcacgaacagcctcaacaatgaagcattatcaagccctgaataacaatagcactgttgagaagccctgatctagagttcaccagagcaccctcaaccacagtctctactaatgaactccatctgcctcccatcaacatccaccccctcttacctatggctactcctgctactgcagccaaagacactgctgttgtgtatttctccacctttctctgcttggctcattcctagtcacttttcacattccagttcatttcctcccctaaacttccaacactccaaagtggaaaagatgtcccccttcagtgtgcttctgcagttaccttcctgggctataacttatcctcctgtctgaggcctccatggggcttgaactacacgaagggaaactgtcatgtttcaggctccaccaaatccctagttccttccccagtgagagagcaggggatcactgagtggttgtatatgaaagcaagcacccatttaagtacctaccctgtgccaggccctatcttagacaacaaatcaccacatttaattctaataggctttggaagttggcatcatccccacttacagatgggaaagccagctcagagaacgcctacaagatcccaaagcaaatgagagaaaagctggattcaaagcctggggcagcacttttcaggacatggctgagcctcccacactaacaccacagccaagtctgaatccagaaagggttgacagggactgggaaagctttaggactttactattctgaggaaaagatgaagagaattttcctgatgatgcaatcctgttgctgatcactaacagacctgcatactaagaactcgaaacttctgttcttaaaatacagggtgggcatgtgttaaggagagtagtagtcccaaaaccaaaaaaaaatgccttgtgatcccctcattaagcaccagaccactactagacctcctgacaaccaccctgagggccaatgactacgcagaaaattaatatcccgctaagagaccaaatggtccttgtgtgaggtaatttttgcactgagaacccgtcaatggggtcagaccccaacctgccttacacagcaagcacccggagagggtgtgtcctggaaatcccatcttaaagcattttgccaagacatccatctaggagcgccatgaagatctgagaagctcagaagcccattataagaaggcatctgacagctaggctgtcctctaagtttcagatgcctaaagagctaaagtatcgcttctgctactactgacttcccaccttcccaccaggacgtcttggacattacaaggctctgctgccatccccaacatggaagcagcctcagctgttagactcaaatgaaacagatgacctaatctcatatcaagaaggctccagggaccctgcttctcctcatgactttggccctactgactcacttcagaacctgggctgctcacgacaaaagcccagtgtgtcctcaaccttgtatttggtggtggtcaaccaagctgctctgagaacagctgcggtctaaacctaagatgttttgggtattactgaattacattactaggtttacctttttcaggactggaaggaggccgcttccaaataaattttcacttcacataaacagcaaaggtgttcccaatggcaatctcctctgggggccagggcactgagctaattctcagcaggatctgggaaccgaatataggccaaaagcctaagttctgctgctcacgcaactgtaaggccaaacagtcaagagaccagctgtattctgttgtattcagtcctgactacaagtaacacgttcttacaaagaactgatgggctcttctgcagccaggagggaagaattttaagagtgtgctgctctgtatgcctggcccaaccactaatctgttcaactccagggaagtcactccccctcctgggaatggagaatgtgcttcaattaaataatctctggggcctttgcctgtgactactttctctgttaaggaatccaaaaatggcagaacaagaaagacttttagataaattaaaaaaaaaaaaaattttaaagcatagatttgtaaatggaaggccagaatggaaaaccggaaaatcacaaagggacttatgctaagaaatggatggtgggaaaaaaaaaaatcaaagggaacagccttctgaaaagatggctttcgatgaattctcagccaagtcagtgatcccgtcaaacctgccttcggggacaggatttccacatcggttccctattttcttgctataggtatcttaaacacaaaacccttctctcgctccctacaatctacaaacagaagaactggtcagaactgtaaaaaacgcagactcctacgggctgctgctttctgggccagggtgggtagctaaggcagcaggcgcagggccgccccctccacccgggtgggttacctgagcacagtcacgcttcccctgcgcaccggcagggaaagcactggttccgacacccgaataggcttgaactggaacttgcagccgaagcacagcgcagagtcgctaaagaaggacacggacacgatggggcgctcgaagatgtggatggggtccacgtgagacacgatgcagccgccgggctggtagtcgttgatgacggcgctgttgacgaagccctcggggatgacgcggtgctccaccagcttttggatcaccagctggtgcacccactcggggatctcgtccacgtcgcccggcgggtagaggcgctcctggccgggcccgcgcttctgcagctgggcgccgtaagtgtagccttcgccgaagaagtacttgttgcgcagtggggcccggtccaccgtgtgctcgttgtacaggcccttctcagcgcgggacaccacctcgtcaatgcgggcctcgatcttggcgcactcgtcctggctgaagaggcgcatctggcggatgccgctcttcaccttgcgcgcctcctcctccttctgcagctgctgctcctcatagtcgctgcgctcggggtccgagtcctcctgatacttgcgcttggccccggacacagggtaaggttcggcggcagcggcggctgcggctgcggcggctacggcggctgcggcagcggcggcggcctcccggctgcccgccttatagttgtcccgggacgtcatggacttgagcttctcacgcaggtccgtgtagccgctggcggccgccatggcccccacgacgctgctctagggtcctccggggcgggcggggcagccgggcatggctctaaggggacgcgccccggggcccccggagggaggggggtccttagcgccgaacccccatgcgtgagtgggggacccggcggggggcgtcgagggtccgggcgtggggtagggcctcaggagcggcgggtcatgcaacggtggcgacaacggggcttcttcctcctccaccttctccacgtcccgcggggcaggggcgccggcagcgcctcatgccgcggagggctgctgcggagacgcggcccgactcccgaccagaccctcggacgcccggcccggcccgcactttaaagctctccgcacgacgtcacgggcagccagcccgacgtccgccagcgccgctccttagcgggctcctcaccgcgcacgcgcagtgctgccggccaccgcggctccgcgcgctacgggcatgcgcgtgcgtgcaggccgggtcggcagaggcgccggcgcaagcgcagacaggaaccgcttgccgtccgccgcccctcccccactctctgaggggcttcaagggaacgctctcaaatagcaacctgtcttcacgccgcgccgcctccaggaccgaagggctccctctacaggggtgcgctcatattgccaacagtgtcgccgtgccgcgtcacggcatcgtccgaacgcccgcagacgcctcaaccccagggcgcattcaccagggaaccgccacaacgtaggccgctccgttacctccccctttggcgcttccacttctttaattgggccgtgggccacgcgccgggcaggccctgactggagtttccggaagtcggttggtaatcatgcgtgtcaatcaggcagtctccttagctactgtgtccgtcacttaattagcggctgggcgagcagcgaggacccctaaaggagaaatgggtggttaaataagtgcctgaatggagactccacctgagtaaagcccttagaacgcctaaggaaacttctgaaacccgcgaaaacttctcagactgcgggacctgcagcacccggccccagttctgaacccagataggaacgtccggcagaagccagacgcgcgttgtcggggtacaagccagcctgccgccgctgccgccgccgcccggagcggacgtttcacgagtcacgtcccggtgacggcgagcgtgggggcgcgctggggttggcgtcgagcctccttggtgctggagatgggcgtgggggcacctcctacggggactctggaagaaaactccaggaaacgaacgggcgcaaggctaaggctaagctatagataatgactacagtcaattcaaaaaagttttgaagcagtcagcaaaggcgttgccgggcgcggggcctcacgcctgtaatcccagcactttgcgaggccaaggcgggcggatcacttgagcccaggagtttgagaccagcctggccaacatggcaaccccatctctacaataaaatttttaaaaatgaactgggcgtggtggcgcgcgcctatggtcctagctactcaggaggctgaggtgggaggatcccttgagcccaggggattgaggctgcagagagccgagctggcgccactgcactccggcctgggcgacagagctgcaaaacaaaacaaaaaggcgtagccgtgcaggatgcactggagggctccaacaaatgggggtcgggggggatctgctggaaaatctcccatgtctcccaggataaagttcccctgctttatttggcactcaaagcttttcttcaagactcttctggccttggctcctcctctcctctctttccatgtacactgagccccagcctggtcctcatcctgtaagccaggtctacaaacatactgtgtctcacctcctggcctttgcccaggctgtttgccatggctgttgcccatgccagttccttatcacccgtctccctctctctctcccccttcccctcctcctcctcgttcttttttgacagagtctctgttgcccaggctgaagtgcagtggcacgatcttggctgactgcaatctcgacctcccgggttcaagacatcctcccacacctcagcctcctgagtagctggaactatgtagaggcgtgtaccaccacaccccgctaatttttctgtttttagcagagatggggtttcaccatgttgtcaaattggtcttggaactactgggcacaagatcctcctgcctcggcctcccaaagtgctgggattacaggcgtaagccactgcgcccagcctggaatggacatttttttaaaaagcttatcaagtttttactatgtgccaggacctgtgcatatactagcccaattaatcgtccaaacaattcaatgaggagggcattattattattaccattgtatatatagggaaacaggcccagagaggtgaaatgacttgcccaaggccatacagcgagtatgtggcctagtgatgattcaaacccaggctgcctggttccagaatctgtgctgtccctcaccggggctccgagaggggagagtcctagctcaagagcagtcagggaggaacacagggaagcttccaatgcagtgtccgttatgggagaggctgtgtcaacctagagaagaggtgattcacattttggctcaacctggatgatctacttccaagaagccgcttgtagtctgtgtgggaggccccagttgtattctgaaagccaaaagggccccctcgttttcactctgccacatcatcccttcctgagcctcatagttcagcttgactagggaaaaggttttggggcaaaagaattagcctgacaccccctccccctcacacacaccatgtatgatctcacaacaatgagaaatgaggggcagagggcaggcctcagggctgcctcatgttggagcccactgtgctctgttttgggggtccctatactgagcatcagcgccgcaggcagaaccccaggggttaagtgagctgctgccaggcatggcccctgcacagtggtaacttgattgacaccacactctttctggtgagttccttactttcctcaccttggggtctgcttctggggaaagccaacccaaggcagtggtgaaaagcaggacagccctgtggcatttgtatcaggggctctttcttgatcctctccatcccaggatggtctgattgaccccctagtcctgccagctgggccttctaatctctccccagttaccaacttctccccacccatcaccaccactagaatctatgacaagttttccagctaacactgcagcagccccctctggtctccccaactcctacattcactcaccgttcagtggtcagaatggctttaacaaagtacagtctgtgcaggttgtgcctccccttccccctctggaaaacctttgaaggctgctcatggctcttgggatgaaattctaaattttttttttttttgagaccgagtctcgctctgtcgcccaggctggagtacagtgtcgcgatctcgacacactgcaacccccgcctcctgggtgcaagtgactcttgtgcctcagcctcctgagtagctgggattacaggtgcatgccaccatgtccggctaatttttgtatttttagtagaggagaggtttcaccatgttggtcagactgctctcaaactcctgagctcaagtgatccactggcctcagcctcccaaagtgctgagattacaagtgttagtcaccatgcccggcccagaaatcctaaattcttttttttttttttttttttttttggagatggagtctcactctgtcacccaggctggagtgcagtggcatgatcttggctcactgcaacctctgcctcccaggttcaagccattctcctgcctcagcttcctgagtagctgggattacaggggcaggctgcccctgtatattattcttattttagtagaaacggggtttcaccgtgttgcccaggctagtctcgaactgctgagctcaggcaatccgcctgcctcagcctcccaaagtgccgggattacagtcatgagccactgcgcctggcccagaaatcctaaattcttaatgtagcccagaagccctatcgaaaccatctttgccggcctcttcagtctcagatcctgctacaagtaatgcgcacctcagggcccctgcgtatgttgttctctttcctctttccctagctaactcccactcacaggtcttatcctagtttgcggtgatttgactgtgattaactgccagtgcctggtatttgcctcattcacagtaggtatttaatagctattgaatggctgaataagtagataaatcctttctctgctgccatggatcttgcagctatgcccccatctacctatctagtctccccaagtgttctctgccccgcacaagctccccaaagcaccagcactttctatcaacattcactcgtttattttttcattcatatgacaaatattttttaagtgcttactctctgttaggcatcctcctaggttctggaagatacagcagggaataaacatgattttctctggaatgtttatcctgctgtcttccatctattcttagcaaactcctactcatctttcaaaactcaatgctaatgtcccattttccaagaaggcttttcccaaacttctcccttgtaccactctcaaacttgtgtggcccatcaagtgatgggggtctggggttggggatacccaaggagtgggggatggtctgttcataggcagtgaatcaggggcctaaggtaactccaactcctgcctcctccctcaggcttgttttccggccacttagcaactccatggagaaatggctgccaggcacaccttttgtttgcacagaaataaccaaagaccagaaatccaggctgactggcagcacaaggaggggccccttaggaggacatgtaagggctagggtgtggagttggagcagattccaacatcagaccctgagtaaaccaaaggcagaggccagttcatctgggcaactggtgtggggcttctgtgtcataggcaggagttaggggcagggtctgcaatgggtacatggcaggaggcctcatggtcctgccttctgctccactgcacagtgggccagacttttgaaagttcctcctgctatctgatccaagtttgcatgctgccattccatcccagttcaggatgggtcttcttgtgttcttggggatttgagttgctcctcctgcctcctcttagtgtcctccaaggctctggccccttacaggggtcattgatcctgagaggttcagtgatttctctgaggccacacagtgagtcttctggcagaaggtactggagggctgggggctgggtcagagcagggtgatctcgctggggggcaatgtgagccgcttctcatgggcactgagcaggttctccacgtgcacggccaccacacgacacagttccagtccctgcaggtgacagtgacagtccacgcccatccaacacttccccagctcttaccttggggtgggaagtacagaatggagaggtggttgggagataggtggagaccatcattcatgcagggacccttgtccccacctcccccagggcctgagaggagcatgaagagctggaaggccgaatggtggggtgtgggctgcaaggggtaagcaagcaggagaccaagtgcctcttccggctttgctccgtgtgagctgtgtgacccagggtctatcgcttcacctctctgagcctcagtggcctcatctgtaaggtctcaattgaccaggggcctgcctcacagacagggctgtggtgaggattcagtgaggctttattgcatgtaaattctttttttttttttcctagatggagtttcgctctgtcgccaggctggagtgcaatggcgcgatctcggctcactgcaacctccgcctcccaggtttaagcgattctcctgcctcagcctcccgagtagctgagactacaggcatgcaccaccacgcccagctaatttttgtatttttagtagagacggggtttcaccatgttggctaggatggtctccatctcttgacctcatgatctgcccacctcggcctcccaaagtgctgggattacaggcatgagccaccgcgcccggccacgtgtaaattctttagatttaaaaaatatgaatccaatcaataaatggtaacagtttctaactgtctgttgccatggttaccgcctggctcccacagtgcacaatgggcagtgacccaggcttagtgctcccaattggagcagggtaggggaaggcatcagggaattgcggaaatcaatctgtgaatgtggttctcagacgaaagccattgttggaatccccccagggaagctgctctgagaaaggataaaatcatgttagaggcgcactctgagtgttaactgtgtgccaggccttgtcctaaaggcctgatgtgtcctacctgttttaatccccacagtgtctctaagagacaggagctattatatcccattccacaggtggggaaacaggcaccgagccttgaagctccagactgcacaactggtaggtggtgggatttgaacctggatggtaagaggcttgaggatcacactctgaagtgctctctgttgaggttagctgtgctggccctgccttgggggccacctcgactaattaaatcagcgtgtgcaaatggagtcttctcctccagccaatcctttacctacctacatgctgccatgttctaggccttgctgggattgttgctgcatttgacagtgtggaacctgaggctcagtgagaatcagggacacctcaagatcccctcacacagcctgtcaaaggtaggcaggatagggacccaggtctgttagtgcaacactgctgcacttagacatcacctcctcctggaagctctccctgattacctcccagatagctcaggtcccctgtataccctcccagcactgatcaaggtatattttatatctgagacctgaggctctgtgagggccagagctgagggggtctcagtcacttcagtatctttgctacacagagatgctcagtggatctatactgaatgagtgaatgaatgtagcccctgacacatacaggccagaggcagagagggcagcataaggaggtcaggtggtgctgcaaggaagtgggaaaagcaaagaggccttcatccatccatctatccacccacccacccatgcaaccaacaaatatgtatggagcatctactatgtgccaggcgctgagttatggacacagcatgaacaagatggatacggtcctgctctcttggagctgacattctgatgggggaatgatacagtttggatatttgtcccttctaaatcttgtgttgaaatgtgatgcccagccaggcatggtggctcatgcctgtaattccggcactttgggaggccaaggcgggtggatcacttgaggccaggagtttgagaccagcctggccaacatggtgaaaccccgtctctactaaaatacaaaaaaatagccgggcatggtggcacatgcctgtaatcccggtatttgggaggctgaggcagaagaatcacttgaactggggaagcagaggttgtagtgagccgagattactccagcctaggcaacagagcaagacactgtagtaaaaaaaaaaaaaaaaaaaaaaagaaaagtaaaaaaaagaaaagagaagaaatgtgatccccaatgttggagacagggcctggtgggaggtgttgggtcatggaggcaaatccctcatgaatggcttggttacccaaggtaatgagtgagtcctcactctaatagttcacacgagagacggctgtttgggccctctctctcttgttccctctcttgccacgtgatgtgcctgcttcccctttgcctcctgccttgagtaaaagcttcgtgaggcctccacagaagccaagcagatgctggtgccacgcttcttgcacagcctgcagaaccgtgagccagataaacctcttttctttgtaaattatgcagcctcggatattcctttatagcaacgtaaaacagactaatataaggagacaatacataaacaaataactaaatgatttccaagccataagtagggctatgggggcagggatcgtgagttcttagggaggaaggttagggaaagcttctagaaaaaggtgatatttgtgctgaaacccaaataaagggagagaatgggccctgtgatggatcaaggaagagcattccaggtggagaggacagtgagggcagagggcccagggcagggagaacaagctcagcacaagggagccagggtggctggaggaatgagcagagatgggggaggtgggagaggaggccacaaaggtcatgggaggaagggacagggatgggaaggactcccagatttggggcctgagtgcctgggaggatcgggaggaaagctggagaggactgttggtctccaagggggatgctgagggagcctggagctcaggtagtctgggcaggaggtagaagtatggatgctgtgatggtagacatggttttgaaagcctcagtatcagacagggtgccctggggagagacccagactcagcaacgtttagagattgtctagggggccaggagtggtggcttacacatgtacgcccctccctacactttgggaagctgaggtggatggatcacttgaggtcaggagttcaagaacaacctggccaaaatggtgaaaccctatctctgctaaaaatacaaaaattagccaggcattgtggcatgcgcctgcagtcccagctacttgggaggctgaggtgggattatcgcttgaacccaggaggtggaggttgcagtgagctgagatcacaccactgcactccagactgggcaacagagcaagactttgcctcaaaaaaaaaaaaaaaagatagtctagaggaggaaagaccagaaaagaaccaaagaaggaatgaccaggctcacacaagaaggctggagaaggctgggtgcagtggctcacgcttataatcccagcactttgggaaactgaggtgggaagatcatttgaggccaggagtttaagactagtctgggcaacatagcaagaccctgtctctactgaaaaaaaaaaaaaaaaagaggtaggagaacaccacagagccattgcaggggctcagggaggtggcctctgggaaggaggcagcagactccaggcaggagcagattggggtgtggtgaggagtgcattaggaccctagacccaagtaacaggctctccaaggggcacagggggccaaggagactttgtctggtcctgtccctcagaggcagagctaggacagtggaagtctctctctcttgccctgggaaatcaccccctccaagacaggccctgtcatgggagtggtgctgggcccagacctggaggggggatgttacaggctggacagggcagacgtgtgggtgtcaacctcaattctgcatcttctctgggcctgaatcctatctcttcagtggggtgaaaacgctagtcctgccctgaccccaggggggtgtgagacttggacaggagtctagaggtcatccatgcttttttacattttattttagagatggggtctcactttgtcacccaggctggagtgcattggcaccatcacagctcactgcagcctcgaactccaacacctgggctcaagcaatcctcccgcctcagcctcctgaatagctaggactacaggcacttttttttttatttttgcagagactaggtctcactatgttgcctggtctcaaacttctgggctcaagtgatcctcttgccttgcctcagccttccaaagtgctgggattacaggcatgagccacggtgcctgtttcacccctgccttttaagtaacagccacagttgctacaaacataggaaggcacagggcaggtgggtctcagtttcaccatctgtcacacaggaagcccagtttctccaccctcaatcctggggcctacaatccagcctccacatctcagcccaggtgaactttctcaaacctctagtgtccttgccctctcatcaaccttctatggctccgtactgccctttcctgtgttcccactgccaagttgcttccctggatggccacccataatgatctgcagttccgtgctgtgctgtggttggttctgtcccatgcactggcctggatactccctggggcatggcagggacctgacctatcttggagccaggcccagagaagggcccagtgagtggaatgttggacttagcgctgggcccacctgctccagctgcagctgcaaggtgcgctgggccgccacgtcccccagcgcaatctccacataggggtagctggagttggccgtgggccgctgggtccgcgtcgactggatctccttcagggggaacttcaccatcaattcctgggagtaggaggagaggggccggacaggcctgtgggcgaggatagtctcaaccactcttacccctgccctgcaaatcagatctgtaggaggcaggagactcactccagttcaagtaccagttccccagtgacttgcgtgaccttgagcaaatcactttacctctctggacctcagtttcctcacctataaaattgattcaacaaatactgatgagatgatgcatctatcatgtaccaggcactgttctaagtgctctaagtgcttgggatagagaggtattggtgccctgaacttcacatcaaagttgcttcttgtgaacacctccacctcttttttaaatttcctttttgtggaaaatggggcctcctgtgttgcccaggccagtcttaaaactcctgggctcaaggaatcctcctgcctctgcttccctaagtgctaggactgcagatgtgagtcaagtacctagcctgtctaggggcttgttttctggcccaggaagcaaacttggaccacatacagggaaagtcagagtgatagagagttaatgcctcagaaagaagctcttgctaatgacagatgggaagtgttgaatggacaccccagctccctcacccccaggagagaaggaaagctctagtctgtctctcagggctccccagctggactgacctccaggtgcccacatcagcaacttgcttgctaacaccccctctactggctccatcccttccctgtctcacttcctcactccagtgtttcctggaatcaactctaaatcaaccacttgccctggaatccctgtcgcagggtctagttctgggagcaaaaactaagggggtaacaggtcctacttattatgggctgaattatgtcccccaccaaattcccatgttgaaatcctaactcccagtgcctcagaatgtatttagaaataaggcctttaaagaggttactaagttaaaatgaagctgttaggatgggccctactccaatatgacagatgtccttataagaggaaatttggatacacagagataccagggttgtgcgcacacagaggaaaggccatgtgaggacacagtgaggacagctgtctgcaaaccaccaaagaaaccaaacctgctgacaccttgaccttggaccgccagcctccagaattgtgagaaataaacttctgttgtttaagttactcagtctgtggtcttttattatggcagcctaagcacacagatgtactatttgagtgcatagagtatgttttacctcatctcaccttcacaacagccctatgggtggggctcaactcttatcctcattttccagatgaggaaagcaaggctcagaggagggaagagacttgcctgagatcatgaaggtggtaagcagtggaactgggcttcggcggctggaggtcttggcctcttggagggggttggggaccagggaacagagggtggcgatggcagtgccaggctgaggccactcacatgagtctctgtgctgagaaagttgaggccattgtggttgatggcaaggatgcaaggggctggcacagcaatgttgctgcagctctggatgaagaagaaggaggagccgaacataggtaaggcgctgaggaggcctgggcagggagagggggtggcagttacgtgctgggcagggctcactgacaacagccatggccctgaactgcatagcttctctgggctgtgtccagccagtgcagaagcccttggtctgggtctcctcccatctctctggcctcccttctcatggcctcttcctctatccctgcttgcagctcttcttcctctgcccagggccactttgagcctaggtgacatctccataatgtaaagacatgttttctccaggcaggtgctcagcttgactggcactgaaaaatgcctttgtgcaaagaaagaggtgcctccatacccatcctccatgaccaccctcctcagcaaagccccctatgatcacctcccctgccctgcagctcttacccagaaactgggcacgggcctggtgggggctgagcgcctgtgtctgctgccggtgctggctgaccaggttgagccaggtcgagcctgccgttgtacggtagagctgggctgggatgtactcctggacttcccgcctgtgtacggaggaaggggaaaaaggtcctgagtgagctcccaggctcaggcaatcctcactgtgcagcaggcatgcagagcagtcctgatctatgcacctccctggaagactaaatgctagggagtgtaaatgggctgaaagtggggtagaggtgcccacagtgccttggtactgcttaatcatggccggggccagtactgctaggatccctgtttgcagttaagggaactgaggctctgagaagttcactgactagttcaaggtcacacagtgactgagtgagttagcggcatgggttggtgggggcaagatgtgaacccaaggcaatttcatccttcataccttctgcccccaaggagaagcaaaagccggaggggtgagaggaaacatcagggtaggcaaagcagccacagggctgtgcagaaccttgagcagaggagtgctgggcctccaggctgaggcccctgggcatcagcttgccccagccctcttccctctgacatacgctggctgctacctcaggcagcccctttacctctttggacatctggaaaataccaatagcagtaccagcccatcctgaccagctggagctgcagatgaaggaagggtggggagaaaaccaggggaaccccctcctcccaagagatcccctgggtaacatctgtccttctttccactgctggggtaagggcctggcatctgaacccagcctccccagttttggattctagttcccccaccattagctggctagtcttcagtaagccatataacctctctgggccttatctgtaaatggggaaaataaaatggagttgggaagaatagctgagataatgcagatgcagagtcccttgcaaaaagtaagaactcagtgattattttcatccaggattgggattatatctttatgtgcttcctgctcttttcacttaaaattatacattaaaaaaagagctttaggcaaggcgcggtggctagcgttgagattacacctgtaatctcaacactttgggaggctaaggagggagggtaactttgagcccaagagttcgagaccagtctggtcaacatggtaagacccccgtctctacaaaaatttaaaaattagctgggcattttggcatgcacttgtgattccagctacttgggaggctgaggtgggaggatcacttgagcccaagaggtcaaggctgcagtgagccgtgatggggtcactgcactccagtctgggtgacagagagagactctgtctcaaaataaataaataaaataaaataaaataaaataaaataaaataaaaataaggagctttacatattgagcccttactgtgttacaggcgctggaatacacatggtacggacatcatcttactattcgtttttccaggggttctcaaagtgtggtcgagggggttgaaaatcattttcatcacattaggaacttgtcattttctctcttgtgctctcacaagtgtacagtggagtcttccagaggctgtataacatgtgagatggtaacaggctgactgcagaagcagatctgggaaggcagctgccttaagtcagacagtacagagctttgaaaatgtaaaagtacagagctttgaacatgtaaaattctcactaatggtttttttttttttttttttttttttttgagacagggtcttgctctgttacctaggctggagtccagtggtgcaatcacggctcactgcagcctcgaactcgaactcccaggctcaagtgatcctcccacctcagcttctccagttactgggactacaggcatgtgccaccacgcccatgaatcactaaatttttttttgaaaatagagttatttttcataaaaagttatttatattgacatttagtgggttaatttttatttttaactgaattaataaatcaatattttaacagggtaaatatattcattgatataacccacataaacaaaagctctttgaggtccactttttttgtttttgagacggagtcttactctattgcccaggctggagtgtagtggtacaatctcagctcactgcaacctctgcctcttgcgttcaagcaattcttctgcctcagcctcccgagtagctggcgttacaggcgtgcaccaccatgcccggccacgaggtcctgttattattattattattattattattttgagacggagttttgctcttcttgcccaggctggagtgcaatggcatgattttggctcactgcaacctccctccacctgccagtttcaagtgattctcctgcctcaccctcccaagtggctgggattacaggcatgcgccaccatgcccggctaattttgtgtttttattagagatggggtttcgccatgttggccaggatggtttcaaacccctgacctcaggtgatccacgcacctcgacctcccaaagtgctgggattacaggcgtgagccactgtgcccagcctatttttattattattattattattattattattattattattattattttgagatggagtttcgctcttgtcacccaggctggagaacagtggcacaatctcggctcactgcaacctccacctccagggttcaagtgattctcctgcttcagcctcctgagtagctgggattacaggcacccgccactacctctggctaattttttttttttttaaatttttttagtagatacggggtttcaccatgttggccaggctggtctcaaactcctgacctctggtgatccgcccatctcggcctcccaaagtactgggattacaagtgtgagccacggtgcccggccaaggtcctcttttcaagagtgtaaaaaggtcttgagaccaaaaatttgagaatgactgatttacattgtgagcattaattataacttagagaacgtcagtttaaaggctgtctaggccagccagggtggctcatgcctgtaatcccactgctttgggaggctgaggcaggagggttacttgagcccaggtgttcaagatcagcctgggcaaagtagcaagaccctgtttcttttctttctttttttttttttgagacggagtcttgctctgtcaccccggttggagtgcaatggcgctatctcggctcactgactgcaagctccgcctcccgggttcacgtcattctcctgcctcagcctcccgagtagctggaactacaggtgcctgccaccatgcctggctaattttttgtagttttagtgagacggagtttcaccatgttagccaggatggtctcgatctcctgacctcatgatccgctcgccttggcctctcaaagtgctgggattacaggcatgagcgaccgcgcccggccacaagaccctgtttctacaaaaataaaaaaattcagcctggtcaacatagcaagaccccgtctctataaaaagtggtatatcatttttaaaaaaagaaagagaaaatcaataattaattaaatacataagtaaataaaggctaacacccataatttacttgacgactccctgttgctggatattgaggttacttctgatcttttgctcttgtagcagcattgcagtgaatgcttttgtggctgaatctttctgcatagctacatgtatttcctggaccacagggaacatgtgtcctgaaagctttttttatcattacctttgctctgagctaataataccagccagaagcaacttgcgaaagagaggcggggtcccagctcctgtggctagttggaagacttcagcccccaggcaaggacagccccttcccagatagccccactggtataagaggggagcctgagggcctggggactgccagctctgaggagggtggaggtgggctgagagggcagggttgcctgtccaccccagctgaggcaggagggcagatgctcacacgctcggcaggtagaagtggtccttggcgcgatgctgcagtgaagccagcttggacacctgctgcagcagctgctcgctgggccggctggccggcacactgctgaagagtcccttcaggtagtcaggcaggacctgcagggagcacctgggtgaggggctgccaggcaggcacgcgtgcaggcacttggctgcaggggacctggggacatgcatgtttaatgattgcagccccatcctcttctggggtaggatggcctattactttcctgggtttcggggaatgatggcagaagcacataagggtgacgtgggagggctgtggccttgatgcccatgagggagtccccacagcaaccttgtgtaggatgtgggctggctggtgagagcagagcatcaacactgcagtgtggacatgtatctatcaggcctgctgtttctcaaaactgagtgtgcctgagccacgggagggcttgccaaaacagacagccaggctgggctcctgagggtctgaggcaggaggtctgaggcgggacttgaggatttgcctcccgtttttgccagtccacaagcctcaggttgagtagcatggtgctggactgcacagggccatgcttcaacagtgacaccacgtggccacaaaatctacgtgaccatattgtgtacaattcctgaagttttggcaccagttccacaaaaacacacactttctgtccaagcacttccacacatactggcacagtaggagaaacctagactttgtaaactccatgatcctgacttagaggacttctaagtctcacagaataacacacagacaaaaatgacagtactagcaaagcctggcttagcacttggagcaaaggacaggcccatgttcagaggaggaagacatccgaaggaaaggggaatgcaaagaaggcctaatggaagaggtgctgtttgggggcagcttgctgggaaggacttaaataagtcaggaagcacagatggagggatggcatgcgcaaaggctctcaaaggtggtgagggctgtttcgatttctccaaagagaccacataggggagcagagacatcagggctagagacatccacagggcctgaatcatgaacacttcaaacaccaaggctgtggagtctgattcacaggcccaggggagcctagaaggtcccagagtccagagaagcctacgtgtgctgacctggttgtagtgcatggtcacatatagctcattctcgaacttgagtggctgatcccagagcacacgccggaaccagagcatgtagccgccgtccacctgctccatctctgaggccacatccaggatgtaagcacggcgactgagtgggcacacatgctggcctgcagagagcagggaggcagggctgggtgggggcatgtgtgcacacacatgtgtgcacctgtacagagcatgtgtgcagaccccaatctgctacccaggtgaggtatcacctcggacaagccacctgcctgttctgggacacagcttcctcattaaaggagagcatgcttgtcgaatggggtgtcctatgttttactgaaatattgatgaccacagatggtaataactccaattcaaagctttaagtaatgctccatttctcctggggaaagaggggctcctgaggagtgccccgagtgtggcctgcctggatctgggaaagtgccctgcattattctcagagaaggcccagctcctttccagaggaggctgggaacaaggacaaacacaagaggcctcacactatgagacccagtgggtgcctttctgcagacctccttcaggagagaccccttgccaggtacctggcataggtgggggtggggaggactggggtctgagcctgggagaagctcaagtctttctctcttgcactgacatttttgccacccatctcacacctgcagtaaaatcttactaaagagagggagtttggtatgattacatgattaccactgtgtgactgtaagtcacagcttctgtggcaggctgaataatgacccctccaaagatgtccaggtcctaatccctagaacttatgaatatgtcactttcctggcaaaaggcactctgcacatgtgattaagttaaggatgtggagatggagatgatcctggattatccaagcaggcccagtgtcatcagcacatgggtcctcataagaggaaagcagaagggtcagaatcagaggaggagatgtgagaccagaagcagaggctggcagggagagagatatgaggattctacactgctggctttggagatggaggaaagggccatgggccaaggaatgcgggcagcctctagaagccggaaaaggaaaggaaacaaattattccctagagcttccagaaggaacctggccctgatgccattttcattttagaacttctgactttcagaattataaggtaatatatttatgtttttttaagccactaaatttgtgataatctgttatagcaacaatagaaaactaatacagcctccctgggcctcagttttcccatctgtaaatggaaaagctaacagtctccatccacttcataaggttgtcgtggggattaaaagagttcacagaatgaaatgctttttttttttttttttttgagatggagtttcgctcttgttgcccaggcacgatctcagctcactgcaacctcctgcctcaccctcctgagtggcaggcaaacgtcaccatgcctggctaattttgtatttttagtggagatgtggtttctccatgttgctcaggctggtctcgaactcccgaccttaggtgatccacccgcctcggcctctcagagtgctgggattaaaggtgcaagccaccacacctggcttttttttttttttttttttttttttgcagatagagtctcactccatcacccaggctggagtacagtggcatgatcatggctcactacaacctccgcctcccaggttcaagtgattgttgtgcctcagcctcctgagtagctggaattacaggtgcacactaccatggttggctaatttttagtagagatggggcttcgccatgttggccaggctgccctgaaactcctggcctcaagagatccacccgcctcggcctcccaaagtgctgggattacaggcatgagccaccacacccagcctgaaatgctttgaattatacctggggcacagcatccgttcaataaatatcagttattaggaccgttttgttacctgccattctcccctaatgtcttagctggacttgggcaggcagggctgatggcacatggctgaggactgaggcagcagtagggagagctggctgggggttgctggagctgaccagctggtgacaggagggaagaccatgatctagagtgggcagtcagcagatggaaggggctttgggatgcatgacggtcacctagggtcccaggagccctcgagaggggctagtgacacctcgggaggggcttctctggccattattaaggcatgaaaggcaggaaagaaggcttgcacctataggttcctataggttccataatatgcggcgctattaatggaaacctttccaggatgtaatctccttgagggcacggcctgtgtcctcacattgagcatgtcctgagggacaaagggagggatgagagagggctctcatcataaggtgaggcaaactaagcaaagcagaaagggacagataaagggctgggcgtgcttggtacacacagagatccttccacatgggggtcaaggggcttcctggaggaagtggcacctgacttgggccctaaaatctgggtggagggccccacatggcacaaggcccggggatgggaatgggcccagcatgctcagtcttcctggcactcaccacggttggtgacaacgaagataacatattcattgaaggcctcagggcgtgtcagagccatctcagcacatatctcttccaccacgtccagggccacctgggggtggggcggaagagatgaggccatgccagttgggcttgacctctgtccttctggccccactcaggcccccagaggccatgtgtggagttcctcagccctcttcacaaaggcgcacaatcctctgaggtctctgagaatcagcctcaggcagggaaagaacacagcttgtggtctgagacttaggtttaaaatctgcttctgtcccttttttgcaggatgaccctgagccagaggcttaacctctctgaggtgcagtttgctcttctgagaaataagtcctgccttgtggggctgtgggagagcctgggagggctcagcatcattgggggcttactccacccccatcctggagcctgggctgtccttgtccctgcccctccagtacctggctgcaggagacatttcttcacttacagtgcatgttttgattttgagatggcgttcaaggcctccaggaagaagaaagagttgcctcttggaactgcggcctgcctggggtagataggtgggagagggatgacaggttgggtcctaggatctgggacagcccttgtctcctgccctgggagttcccaagccaaaggatcctgggctggcacgtgtaggaacacttgagcacctggaccgcgcagggcctgtctgcaagcccctgagtgcaatgcacctgacagagaggtctctgggcagggcttgtgtctcccattcatttttttgtgtgtgtttgtttttgttttttgacatggagtctcgctctgtcacccaggctggaatgcagtggcacgatcttggctcactgcaacctctgcctcctgggttcaagtaattctcctgccttagcctcccgagtagctgggattacaggtgcctgccaccatgcccggctaatttttgtatttttagtagagacggggtttcaccatgttggccaggctggtctcgaactcctgacctcaggtgatctgcccgcctcagcctcccaaagtgctgggattacaggcatgagccactgcgcccagcctcccattcattttgaacccactcccaccctatgctcaccaacatggcccgaagctctatgctgctggggagctccagacgacctccgaagcgcaaggttttctgcaggttctgctcgcaggccttggcgatccctgcagaagcagggagttcaggcctcgcccaaggtggactgtgggagaaaggggctcgctcctcttgccaccaaccatgagcccactgcattctctccacaagctgtggggaaggcatttactcccccatttgacagttgaggaaacagttcagacagggacagtgacttgcccaaggtcaagagctagaggttaagagctggatttgaacccacatcccatgtggctaaggaccttttatctagcccatagtccccttggcaacctatacgcctggaaaccgctgtcaccctgagctgctgactggggagcttgtatctcacaggctctgtggctagggtgatgcagctctgctcatgccagctgggataccctgccagctgccctccctcacccaggcctcccagtgcaggagaccccagcatcagtgctccatttctcttgagtcaagagttctagggcacattctgctgcttttatgcatctgggagctcttccatagggagctgggtctattcatctgtgggttgaatgtttgttaattgaatcagagagaagcattcagaggcaggaagggtaaggtctcctatctcctccacggctgccatggtgactacaggggccccagcctccttcttagggagccccaggggttgctatggaaacaacgctgaagagtggccccccctttctccatattctaagggggatgataccagcttgggcccacctctgcccagatccctcaagacccttgctgagtcccaacagtcagagaggcagggccgcaccccagtactctggattcttgcccacctccttctcttctcccacgtaccacatattcccactcctgtctttgctcctgtcactcactccacctggaaatccctcctacccagggcaatacttcctccaaggagtcatccctgaccaccccctccattagatcagacaaaccaccacgccagcccctgtgaaaccttaacaaatgtttggggagtatattaatattggtaaacattgctcagcacctgtgaagagcgaggccctctgggtttcccctcccaccagctgtccacccagtccccaagggagaagcatgcagccctgggttcccactcattgacctctcaccctgaaagggcaggcctggggtccggctcacgtcttggaggaagcgagtgaggtgtgggtggaggacctcagagcagctgtggtaggcggtcacgatatacagcagcctccagcctcgctggcagctgtccctgcaaggacacatgggggctacagcagaggtggccacagcactagagtgtgccaagagcctcctgggattgagctgagacagattccaactctcaggcagctcctgtcccctgaggatgcccctccctgcgcagtgatatgcaaaaggcatattctgcttgggaagtcaggattggggatagggacagaaggggatggggccccagacatcttccccaggtaggggaagcactgcgactctttcctctcctattcttctcttctctgcctcacaacaggtaggggatctctctagggaggcttctgggaaaaggggaagctgctgagactgtgtagaggtcatgccaggtaaggcccagggctgggaggagcaggaggacaagctgagtggttctaaaaatcctgaggagatggagagcaagtgaggaggtagtacagatggagacaggagggtggacctgatggtaacaagagcatgcacacattgggcacgtactgtgtgctggccctgcatgagtggaacacagtaattcatcttcacatggtcctgggtgtgagggtttcatttgtagggatatctggtgtctgggaacaacacttgggcttcctttgggaaaccacccaccccgctctggatccctgtggtttggagatgggcatggaagtcaggtttggtcaatgtgaacaccgcagcccctggccacagtgattggcccagggataggcatagttggttcagggttgagcatgtgaccaactcaggcctgtaaggctggatttaagaatttctacagcaaatattgggtcagtcttgctttctctgggattgctgagctgttgccccagacctgccaccttgctactctgtgcgagaggctgtttgggaatgatcaacacagaggaaagcagagccagaagatggagaaagcctgcttcctgatgacacctggatccagctatgcctgaggccacatactcactgacttttcacttctctgaatcaacaagttcccttttggctaaaccagattgagttgggtttctgtcacttgcaactaagaatctggacttacacattatcactgtcattttacagatgagggcactaaagttcagagagcagaaatggtgtgttccagaccaagtaattccaaaaaacgtgctctattgagtgaggatgagggtgagaggaagataatccaggaggggtcaggcctgaggaggtgggaggctgaactggtccctcctggagcatggacacagtgaggggatggtggggtaaagtccagttcactcactgcttggagctggtattgtctgtgatctgcttcacaacttggcagtaacattcatcccgcatgacctcatggtccccgcacagctgaaggggggcagggaggttacacaccaaagacatgtgaggggctatgtcatataccaggtacataagaacagggtgggcacctgaagacaggcctggtgtccctttcccagccccctccccaccagcatgatgcattcctctttggaccatgggagaggtttcccaccctaatgtcctgtgactcattgatagatggggaaactgaaccacagagcaggaaagggggcatctggcaaagttggctggactgaccttcaggaggttacaaagcacgtccaggtcactctggcccttcagtggggcatcccccatgaacctcattacagctgtaggaaagacctatcccactcagacccaccaaacccccagttgcccacccaccccaggaagccccagggctgagcccctccctgggagccttggccacaggcagctgggagcttctattctcttaaatgtgttccatgtctgagctggcgggagggaaagaatctgaagatcagggaggagtggcaaccagtagagatcacacagtgctggatcccacctagcccagagccctggctgcagtcccactcccacacctaggaacatgtcggtggccatcttgctgaggctgctgtcgctgagttcgatgagggattcctggaggggagtctgtgggggaagagggctgtgtcatgatggaggagggacacgtcagaacagaaaggggacacattgtgttccaaggccatatgataacaggagggtccacgtcacaaaaggggagccaggcccaacactggggacagaggctgtccttgggagggaatcagggtgctgagaatcagagggtctcactgagaacaagtttgttggccccaggggcctgggagggggcccctgcatcaccattttacagatggggaaactgaggtccgggactggacaccttggtgaagcaaagcatgtcctccaaggttctggactcccgaggctccttggatttcagcctgaggccatccctgcagtgggaggtgggtgctactgacctgtcctgcccaagccttggctacatccttttccacatgggaaagaacccccagggagggggttcttgacccaccactgatcagtctaccggtcacgaagacccccagaggcaggcactgaaatgagcctcacacctgggtggtctctcatctctcccaccagaagtggggcctccgagactgacagcctgcagtttggatggcagcaagaagcccagcaccctcccactgtgggaagaggggtggggccgccactcactggggtctcctctgagggtctcggaaatacttctgggcaaactcgagcattgtgtagggtgggagcgccagggcgtcctccccatggtcagcagagcgggccctgactgggggaccctgcagaagaggcggagctaggaaggcccagtccggccacaccacgcctagcccttcggtcaaaactgacaacgcaacccctagctgactggacccagattctcaagccgcccacccacccatccctgtggacccacccgcatcccgttgttcttaccccttcagcccgcccacgccttttacttgctgtgctaacctggctccctgccccacttggccacgcccttgcccggggttgacttccgcaactgccacgtcacagctgaccccgcccctcgctagctccacaagccgcccactcacctggcaccgccccaaacccagtagacttcaccaactggcgggccccggctggtctgaccccattgtcctgattacaaccagctgatcttcatccttccctaccccatttggccacacctccaaccatctctggtcccatctcccgggtctcacctgcggctcactctacctggttcaccctcacactagtccaagatcagccacgccccaagagcctggccaggcccttggcccaccttatccccactcgcctcaccccttctgcagcggccccttccccctggtctaccccgccccaccccacccacactggtctcacctctctcctgcggcccacctcctgtgcagcggctgcagaggccacagcagcggccacggcggctgctcggccgcggcctggctccgttggcagctgcaggaagtcgggggcagcagcgggctgcaccagctccgaagggaagcggcccacgcgcccgtggatggtcccgaacctccagcctaggggtgggtaaaaggtctgaggcaaacaggagggtcttgtcttgtgactaagggggtcctttagggagatttgggaacattcttaacccttctctggaactctatgaggcaggccaggccatcaaacccattttacagatgaggaaacaggctcagggaaagaaagggattttctcagggccacaggaccataaaggggaagtgaagcaaaaaggcaaagcagggtttgtggactctcaggtcatgtggagacataaagagagattcaggccacaaacatggaaatgcccacggagacccctcaggcaaagcagagggctgggctgtctggccaccaacagatactgacaggccacggctggaccttaggagacctgaccagcccaggccactttcgggcaccaagaaaccctcactgtgcatctgcaccacgagtgggtgaaactaggatgcgccccgtatggggttccaggttctggggcacacaccaaagtcggggcctctacgtcgcagctcctccaggtacaccaccttcctgcgaaccacgcagccagcactgtagcctatgggccaggctcgggtcagcatctgccagggaggcccccttggccagcctccccctcctgcccccagcccaccccagtggcactgacccactcgaggtggctctaggggctgcaggtgtatgatgtcacccttgtggaaagccagcagcgcagggtcctcaggcaggaagttcctcacagcgaccacgtagtcagagtcctgggtcagccagaggcagggtgagggcaacagccctatcaccccactcccagaggcctagggccacccctgctcctcacatccttcctgactcatcagggaagggagccttcattaggtgagaagagggaagggcattctgggtggaagaaagggctggagggtgagtctgagggacacagatggactttagggcacacacataggccttccccactcaatccctcacagactttcctgctgaagtcttcctcgggcctggggcacagagatgacctgccctaggcctgggggctgccagtcaggagtgggcagaggggatggaaagagattgtgatgcagtgggcgggccatgcagccaaggcaggagggtaaggagtacaattgctgcagacctcagaggaggtgctgtgccacccggcagggggcactggcaaaggttttctgaaggagcaggcaaaagggagaaagggtattccaagtggaaggcacagccagtgcaaaggccttaaggtagacagaaatctatggacacagtcatatttccctggaacagggagatccctgttgctggccctcagcctgggtggagggaagatctgtgagaagatcctgaccttcttcagctccaagatgaagtcatctaccagggtcttgacctggtgcgctcgggctgagaagaggatgaccttctcactggccaggttgaactccagcatgttctgggagggcatggtcacaaacaggatatctgcaaagctggaggatgggccggtggcatgactcccctgccagagggatgccctccttccacctattgtgctgcttctgatcctgtcctgccccatttgaagcccagccccaccttggccccattgtgccagctcccacagaaccctaagcttcctgcttcccctctctgacccaggctgtggcttcagctcagttcctaccaccctttgggctgacactccggcccctctccaccctttgtcccttggtccaagctctaaatctagatttgcacctacccaaatctctctttcacccattgaccaaattctctccatctttcaaagcatgcaggttttacctaaccagttagcaaggttccattcccatcctcgtgttaaaaaggacaaaagggacttctagcaggggagggagtctgagtactcagtaaggtgtcactgctggcagtggttccctccccagctgcatcaggatttggtcatttccagcacagctgcccctctgcacagtgctgctgctgtgcaggttggggggagggcaggggagtgggtgcctagctcaatcccttcctggctgtgtgacctgagacaaacaacttctctctctgagcctcagtttccccagctctaaaatgggtttgcttcaatggcttggcacagagcctggcgcatcatgggtacttggtaagtggctgtggaggggaaggaaatgccgatgccagtctgtatcccagtctccagccagccccacttcacccctgctggtcacctgtatgcacgcaggacccgcagctgcccgccggcctcctggccacccttgaccatcctcaggagtttgatgcccacgtgggacacagctaggagctgcacaccagtgcccacgctgccctggggcagagatgaagggcgtgtgaggatcctcttgtctcatccctgaatcctctggacaggtagggggcaagtgaggggctcgcaccgtggcggggaagatgcgggagaagtagacctcccaggtgtctcgtgcagtgctgaccacggcccgcttcacgctttccgttaccagaggcttctgtgtgtccagctggttctgggctatgggaggccaggtctggtcaggaccctctccccactcccctggcaacccccatctcggggatgtcagggagggaggtggctgatacccagcaagaaggtatctgaccagtgtctatactagaaaactgaaacccagaaatggatgagatggccaggacacacagtgtgtcaggcattgccaaccccaaacatgcagcccggccatgcgagaggccagagaagcagagcaaggaggcacatgtctgggagatggtgggcctgggcttgtcagcctcagtctccctctgggacagggctggctgtgcctctgactggttgccccatcagtacccctcctctcccccgagataccaaacaaggccttcatcctgagcctctcatcctcagagatgcgaaggcaggcctcggagagcgtgtcgtgcaggatctgtgggaacaggctgtgatgcaggcagcacatgggactcccccagctgggacccaggctggactatactagggtgagtggcaatgtgggaggggtcccattttgcagcagtggggtcatctgtaagctgggtcatctgtgtaaatcagatcccacttacagggccctctcctttctcctcagccccacaatccaggccacccttcctaggccaccgtttcctactctatataggggggtttacagggtttacatttgatctctgggccatgtctagctcagacagactatggctctgattgggttgaactgtgggctcactgaccctgcccatgggagggggagattcaataaaacagctgcccatcctcacccctgtcaaggaccccaaatcccaacatgcagaggcaggctttgcagctagctcatctttgcgtccacacagccctgctgagttcactgaggcagaaaggggagacaggacctcacctgccggaacaggaggtcaagctgcacaggatggctgtagctgtccttggggtaaaacacctgcaggggcggggcttcagtgggtactgtccgactgccccctggccttgcttcacacccggccccgccccctaaatgcagttccgccccggctgtaaccccacccctggtttcagcccggcctttttctgtcctcctgggctccctccccaagtcctagaccctcctctgctcgcttcagcccctcccctgccccgcttcagcccctcccctggctacggctgtgctcggcacctctttgcgcaggaagatcttccagggggcgtcctgatagccgtagaagttgggattgatgaggcggtgcagccgcgtctgcgtgagttcctcagggggctccagcgatcgcgagggcagagctggagagcgcggggatcagggagtcaggagaaggcacctcgtttttttatttaattaatatatatatatatttttgagacggagtttcgctgttgtcccccaggctagagtgcagtggcgcaatctcggcccactgcaagctccgcctcctgggttcaagcgattctcctgcctcagcctcctgagtagctgggattacaggcgcccgccacgacgcctggctaattttttgtatgtttagtagagatggggtttcgccatgttgggccggctagtctcaaattcctgacctcaggtggtccgcccgcctcggcctcccaaagtgctgggattacaggcatgagctactgcgcccggccacaggcacctcctaggatgaaatgggagaggcagggcgggtggaggaggggacccaggagcagtccacggaaacagctgctcacaagggtcacatatgacccagcctttcattcaacacataaaaacacctattggatgtgcccaccaccacgcccagctaatttttgtgtttttagcagagaaggggtttcaccatattggccaggatggtcttgatctcttgaccttgtgatccgcccgcctcggactcccaaagtgctgggattacaggcgtgagccactacacccagccaaaacacctattgtatacaggcctgggctaaaggctgagatggccccgcaaataaggtaaacaatgcccctgccctggagtttagtgcccatggcaggtgtgggtggcacagatcattcagaaacaaagctctcactgcccgaggctggggtggcagtaaagcagggtggtttaggatggatcctggagagctggtctgtgaggtccttcactcctagcaatctaggcagaccttgccgaggtgacagaggtgacatttgagctgtgacatgaatggtgagaaggagccaggcatgcaaaggtcttggggaagagcattctaggcacagggaacatgcaaggcaggagtgggcttggagtgttccgagaacagagaggaacagaatgtgccaaggggaggaagagaggagatgaggctggggaggtgggcacatcatgtcgcgtctcataggccacggtgaggagtttggagcttattgtaggagccatcagagggttttttatcaggggcaggatgggaactgctttatagctgttaagatcactgcagctgctgagagacaaagggtgtagaggttagggcttcaactgtgatgccaggaggcctgagctgatatccctggtctgacacttttgagctgtgtgaccttaggcaagccagttaacctatctgtgcctccatttccccatctgcaacatgtaggaacaacagtgctaccttgaagggttctggtaggattacatgaggccaggatgggcctggcctgagatctgtgctacttaagtattgacattataattacaccaatgtgctcacaagatgtacacaggggctcagggacatagacacacacactccaccgacacactcacctgtgcccacagacttcctcatatacttggacaccctcccctccctccctcctggccctctcacctgaagtgggtgccatggatggccttggtgcactggtcaccggcttcaccagggccacggcctctctggacacctgtcccaccccaaagagactgctcagggggcaacaggcaggccctgtggaggggcagtggcagggccacagcttataggggtagctggtttctgaggatccctgaggcccctctttgtcttctgttccacctgggctcagccccaccttcccccctcacctgggtgccaggtgcagctgccaggtgggtcatctgccctttcaggatcatcagggcctcctcatgagggtctggccgcttcatgaacactttcccgccatccttcctgtgggcattggagtactgtggtgggttgacactgagtctccctttcccatcacatagtttgacagtaggaaacttcctcctcctccaccaccccctatcattataaatgagaatccagggagaagcagagactggcctgaagtcctacagcacaacctagacaacagcagggcctcatctggactcatcagtataaagaaactccctccctaacaggagctgggcagggcgcttcaacccagtaagctggtgggccatgatggacactcaggtacagtgagggggctggcgggctgggggcaggggcagtgctgacctgagggcctcaggccggcctccccggaacggctgctggtactgcctgacaatattcttgatctgctgtgtgggctgtgggaagtgctcagagttgagcgtagagtaccggaccagctctggggagggtgaagctgtgggcaaggggcgcggtgggaacagggtgaggccacaaggggcacaaccacaccaccaggcctgtcctgggaagccccagaggctgggatagggcactcactggtttctggagaagcctgatcctgagctagaacaggggcagccacaggcttgatggggagccttggagccttggccagaggggctggggccaagggctttggagtggcacgcaggagcacgggtttggcagggggaccggtgcctacagacgtcggctgtgcctctggtgctgggggtttctgtggagaacaggacgtgagggtgggctgcctgggatataccaggctgctctctgggactccagatctctgtcagagatgggttgtggagctcctgggctcaaagaggcacaatagtgccctggagcagcacagcattcctctttacagcttgtgtctccaagcaacccctgcaccctgggcaggccaggctcacctctgcgggcaaggatctcagggcagcactcaggggctgctgctggagtgccgtggcctgcagggtcatctcccgggcctggggagaggtggcagtggtgaccaggcaggtccattctccaccccccagcagtccctccctcactcaccagcagcacggcctgtttgtggatgaaggcttgctgcagagccaatgtggaggcatccaggcctgggactgaggggagggggcagaaggcacagatggcaccggagatgccctcctccctgtcctctcagcccccatcatgctgtggctgcctccattctagcacaccagcaagtggctctggccctgcccaaccctggaaccaccctggggaggcactgacttggctttggctctgggggtctcctgggggtgtcttcagtaccactactgctgcctccaccgggctggcctccccctttcatgcggtaggcaatggctgttggcttctccaggtcctgggggcagtgggtggctcaagtgaccatctcattattgtactcccaaggttccatggcaacaggcacctgacactggcctcttccccaccctctcgtgggagggggcagcctcccactggctcagtgtctgctgtatgctcagcctttacccctatggcatcccaatcagtcgtatccataaccatatgagctcccaacccatcccctcttccccagaggagtaaactgaggctcaaggaggggttgtgccctgctcagggctgcatatcatgccaggggcagtgggggtggggtgggttctggagtttccagagtgagtaagggtacctgaggggtctcgtgagatctggggctagaagacccggggaccaaggtcattcaactccatccagatagagatattttagtggccccggggggctggctgccaccaaaggtgcacttcttccctttctttttttttttttttttttttgagacagggtcttgttgttgcccaggctggagcacagtggtgcaatcacagctcactgcagcctcagactcctgggctcaagtgatcctcccatctcagcctcctaagtagttgggactacagaggcatgccaccacaccttgctagaggtgcacttctaactgtgggtccttccaggatcagccaagagcatctctagctgtgaagagaccctcatcctttgtccagcctccagcagacatccagatgggacacaccaccccatgaccctggctgtgagaagctctcaggtcaccctgtacaagtgtgtgacttgggtgtacatgctgtgcctgctgtctgcaaatgacccaccccacaccatccctaccgcatccccgtaggacagcacagggtcaaagaggctatccaggtagcagtccagccccttgtggggcacagcaggctctccaagactgtctgactctggaggggaaggcacaaaaatgtcaagttcttttttcttgatgatttccaccccacacagcctctaaggctccctccccaccagagacagcagccattgttggttgaccttggtgggttgctgtccctctttgggcctcagtctccccatttgtaccgtcctgattgtggctgctgtacccatcagagtcaagtactttgggcatgtgctcctggggctggggtctagtggacatgtcctcatccgagtcccagctgttcccaaacaccctgtggagaaaaggaacatggagctactgacccccagagagatcccagaatcccccaaatttttttctgcaccctggtattcagtggctttctccatttaaaagcaggatcctttggtgaactctacctccttaagaacctgaagtctaagttcagggctcagcctgtcccagcagctgggaggggcaggccttctgcctgggagtggccggccttctgcctgggagtggccatctgtgagggggtcccccatagctacctacactttggggcctcccctgctggctgcaggcccctctgtgcccacaatgaagtaggacttctgtcgagggaagtccctgagcagctccaggtccgacaccaggtctaacacgtagtcgtggccagccagctctgcccactggacaccattcttcatggccacggtccagccgcgccagccatctgccagccccctggtgatggcatgcacaggaatggaaatgagggacagagtcatcaggcactacctggggagatcctgggttataagccagaccctaaacatgaacagaatggaccctatgggaccctctgggggatctgacctccccccacaacattccaggtacataagagtgtgctgggagggcatcctaggagccaacctgtgcctcagaatgtctccagccacctcttcccccgtactccaggagtgcaccgggcaggagaactggtcacctggggcgcagcaggtgccgggctcaggttggagcatctgagtccagtttggctgtgcctccctgcttgcttcttcctttcaggcttcctgtatctgtagcctcacttccctggctcccctttcctgggccaggtcccacccccacacacagactttcacgcagagccacatctgagaaggcccctccccagctccagaacatccagtggcttctgccatccccggggctcactgggccctgctgactcccactgccctcactgaggtgggggaaggcagcttaccattgaagcagcccacgtccagcgccatgctggccttctcataggtcgctgtccactcgagctgggtcgggggtaaggtgcgggcagcccccgagccctgctgttgggcccggcccatggcctgcatgaggcggtgctgacacacagcctggaagccattccgcccataatcagacacaaacctgatgggtaggagttggagccaggatcaagaaggatctgaagctagcttggggctgagggctgcggggtgggggtaggaaattctgaggctagtctgagaaaggcccaggctactccagagctccaaggtgaggctaaaaaggctccaggctggttcacaagggtcccaggctagagtccagtgctctgggactgcacttaaggggtcccaggctagcctacaaaagatctcagggtagtttagagtcccacggctaaactgaaagggtcccaggctagtccagaagtatctcaggccagcccagaggtccaaggataggccaaagaggtaccagcttgttggaacaaaatgtcattgacaggctggggtctgcagctgggtgtgggcaacaaccagaactctgtctccattctctcacagggcaaccttggatgattatctgccctctctgagcctctcctccaagttttcacctataaaagggacagctgagggttcaactcaacccaggcccaatgagcccaatccctaccagccattcctcatgcttccctcacccccacatcctacatctcctgcagctaagcctggccaagagcagcactggtgcaggcccacagtagctagagagggaacctagcaccatgccctcaggaaagccccaggcaggcagaccagcaacggccttaccctgctgtcagctgccacagagtcacaagactggccaggtgatgtccatttgctgcatgctggcctaagcaagattctgtatactctaactcacagccaccctgttaggtgggttctgttgccatccccaaattatagggaagaaacaggttcagagagggacagtgacttgtctcaggccacacagcaggtaagtatcagagctgagattcacacccagggcctgcctgagcgatttccttgcaaatcatccttctcacccagcagggtgacatcattgtgatggttatacccacatagcacctaccatgtgcccctctctgttctaagcactttacgtgtgtttatatattttatccacacaagagcctatgaagtaggtattatcattatgccatttttttttaacatcagacagggtcttgctctgttgcccaggctgaagtgtaagtggcatgatcttggctcactgcatcctcaacctcctgggttcaagcaatgctcttgcctcaacctcttgagtagctgggactacatgcgtgtgccactatgcctagctaatttttaaattttttgcagagacaaggtctcaatacattgtccaggctggtcttcaactcctgggctcaagcgatcctcccatcttggcctcccaaagtgctgggattacaggcctgagccactgcgtctggtcttgtgctgatgttttagcaaggtttgagggtgacacatctcatgcctgagcatgaaaactcaatcatcacacttataaactataaaagaataacccccatttgatatgtaaggaaactaaagcccagagaggttaagtaacttacccaaggtcacacagctcatatatggctgagctgggatttgaaccctgattgtctgagtcccgtatccatgctcctaaccaccccattaaactctcatgctgtgagaggtcaatgctcttttccaaattctccacatgctggtcttgtcccactctgagttctggaagtccctcatccagtctgacctaactcctagcccctgcagtgaaggcctgccctcctttcttgctctgagcccagtagaaatgcagagcagccctggccagcctccatgcctgagcttcccagcatagagatctgactcctggcctgacctttaagaccctgccttgggctccactgctggtgccaccgtccctcgtgtcccagcccctatccagtcccactcacttgagaaggtacttgttgaagcacggggaaggtgcaaagccactgaggcaggcggccagcagcagccagccccgctcagcattgtgggcattgtgattgtgccacacctgattggccagctgtgccaggatctcatcccgcagctcaggcaccgccagccccttctgcacgatgtagttcccgaagatgttctcccgggcaccatgcaggtgggggtcgcccatgaagcgcaggatctgggccacgaacagagtctcctgggcatctcagaaagttgttccttccagtccccaccccacaacatgcatccctctcatgtccctcccatgtgtgcccctgcccatataaatgtcccttatattacaatataactgctatatatatagaatatttttttgagatggagtctctgtcacccagactggagtgcagtggtgggatctcagctcactgcagcctcaacttccccgggcctaagtgatcctcccacctcagcccctcaggtagctaggattacaggcacatgcagccacacccagctaatttttgtatttttagtagagacagcgtttcaccatgttgcccaggctggtctcaaactcctggactcaagggatctgcctgccttggcctcccaaagtgctgggattacaagtgtgcgccaccgtgcttggcctacaactgccatattctatgccgaatgaccaggcagtttacctcaactatgggaaaactaaagatccaaagtatgtgtcatctttcctgttcatgaaccttctagagctccccatgcagccctagccccctccctgcacccctggccctccagccagcccccacctcctgctctatctaggccgcagagggttctttttaacattcagatatgaccacaaccctcccatggaagcacctgccttggctccctaggtgccttgggatgaaatctaagctctgggtactgtaatcaaggcctcactggccagtctcacccttgccctcttgactctgttctgaccacaccaatttcctcttctctgtgtactttctccactctccctgcctggcaaattcccctccagctcaaatgccttctcctccaggaagccctctctggccctgcccagggctgaattagtggccccatcagactccccagacttggtgcttccctctgtccatactggtggtcactggctgggtcaactctgcctcccccttcagactgagaagtccttaaggagatctgggtctcttcttggtgtccttgagaggctccaaggcagaatttttttttttttttttttgccaggaagatggctgggagaagaaaagccaccagtcctcagagaggaagccagatttccccctctgacataaaagtctgtcctttggggaagaggtgtggggctcatgggttgggcttggggagggctgggaagactgggagcctcatggcccagtttcagggccaggggctaagaattagaaggtgggctggggcagaccccataccagcttgaagatgctcacggcttctgcatggtgctcggctggcagctgcgtgaggggtgtcctcaggggcactgtcagcatcccaaaggcaggttcctaagacacagggcaggcacatgagcagacagagctggactgacaggcacatctggacccactgctctgtgccacatggggctccaaggcctatgaggcaggggctttggtcctcagtgtatggatggggaaactgaggctggtgaggggccaccacagtggccctcagcaagtcggtggtagggacaggataaaccttcatctcaaggggaggaaatcagagctgggctgacatgctatggctccaccagttgttcaatttctgaaatatttccagactggttggtggtaaacagccctgcccgagcccctgagggctctccactgctatccagacctcagggatctcccagattccctatgatccagcaactaaaaggctcatacccaacaccacagggcacagccaggagcctgccccagggcaaggacaatgtccattctaattggtcagcgcctatcagccagggagccttggacttcagctagcccttaccttgaagtggcactggacaaacttggccataggatagttgttgatgtccaggggcagtgtgacacggggctcagcctggagtcgaggagtcctcacaggggccacctgaggcacctgggccagcccgaggcctgtggaaagaggagggaatgcggtgcctgctctgatctgcctgggccctccccccgcctggtgctgacccacctgccactgcttgcaagagcccagccagctcagccggtacctccaggtgccccacagcgactacctcccgcttgctcagctcctagagggacagtgcatgggacagggacaggcctgccacatccccacctgccagcctccctccttggccctgctgccacccagacccacacccacctcctgctcccacagcagcgccccctccacctggcacctccactctgccctcagcttcagaagagaagatgtcaggttggggagtggcaggcagaggtgacgaccggcacccaggcaggccaggccagcttacgcaaggcggccacactcaagcaaggggggcagcttgcctgttgtgtggaggtgactgccccactccacaggtggggcgggaggctgaggttggccagagaaaaggggagggaaaaggagagagcaagagagaaacagaggcaagcggagggagaaaaacgctggggaaagagacacacaaggaggatttctgggaggtggctgagcactgtgtcatgggaagccctcctctgtagcgccaccttcagtaaaggctacctactgcttcattgctttgggaactgcatttgtctttctggtggctagtttgcatgacagtgggtcaagacatgaaggtaagagcaaaaccatacccagtgacattcaggtcaccaaattctaatggccctcaattcccgaagaccccactgtgaacccagcaccaggccaaatccttcaatgcaacatctcatttaaccctctccacaatcccaaggggtagatgggaaaatcgaggatagacaatggccaaagttaaagagctagtgggtggcagaggcagaatttgaacccaagactgcctgaggccagtagtctcctcttgggtgctaagtgccctttccccttctctgctgtccccttggacccagatagggtagggcctataccttgagatagcgtcggcggctcacgtatgcgtgtaccagggaccggaacttcaccagactcctcctcatctgctgatagcgttgcctgggttggggtagtggggaggtcagggattggggccacagggtgacagggtgaccaaaaggtagagaggcccttgccagcctggcctgggagccagtgcccacatctcacttttggggtcctttggctcaaagggaaactggagctcagagaggggcagtgactttgccaaggtcacacagcatattaagtagcaaggcctggattaaacctgcctgaataatttatttcccaacagcttataatctcaggtccctgaaatgcagggtaaggcccctcttggctgaatggattcccacccaccagtcacaagggcctggggttggctgggaagggcattcaaaagcagagacacagagaatctgatcattctcctgcagaggcctccaccctcagcttgcatgcctccagggatagggagctcaccacctaagttcaggcgtgacctctcccgagcctgaccataggtctcctaggaatcctgccttttctgtgcctcacctggcaaggtagccacgggcccggctttgcagcaggatgatcttgtggcgcagagagcggaatcgccgcttaatgaagaagccacggaggcagcgctgcagagtgagggctgccagattcaggacatgctctcgcatactctccagcagctggtataggtgttccttaaggaacagctaaggacaggaggaaggcactgaggcagataggagccaggaggctggactaagggcccctccctctctagaagtccgtggagacagaataggcagggcagcctcctggagcggggctggagggatggggtggacttggagaggttgaagagaggatgctggtgaatcaggtagttagcattccatatcccaagctcatctgggttgctcctgggatggcagtctctagcttggacatttctgactcagtagttgtggacccccccaaacttggggtctccaagggctgactgtcgggcaggactcaccttgctgaccccaacacggtacatgtttggcatgactttgcacaggcgactcagcactgacacacacatgtccccattagccggcaggtcatgcttgagggccactagacagcagtacctggtagggggcccaaagttagtctggggctatgagacctacccgaggtgtctgctagaccatggggttactgcccccagccaggtgtccaaaaagcctggtcccagtggtggctccacaaatagtttattctaatctgaaaaaaggcactccatcctcaagactctttacttctgggtgtcagacaattgttataatagatgatttcagtacaacaggacacttgactgccacctgctggaaacttgtcattataactactaaaaccattctaataacgcggagcgttgattagacatattatacgttatacaacatataactacaaaaaaaggcaaaacaataaatgtatctaccacattaacagttagcatgtggtagccttgtgaagtgtacaacctgagcaactgtgcatggcaagccctgtactgcctgggttgtgtattcctggggccatggggagttgggcagggatttgtagagctcaggaactaccgtaaccaagatacctgtcgatgaacccctggaaaggcaggcgcactggaaatccctccttgcggatcctcacggtctccagcacccctgaatagcgtaattgtgccattaccacatctggctcaaagagacctggctcctgtagggatgcccagagagggagtctgcacattggctcagccatgtgcaaaaggcattatcatggtgaatattcccagtgctaggctgggcagatgcaggtcctgagaggccaagccacttgcccaaggtcacacagcatgggcaggaggatttggctctctcagaggcctcagctctcactcaccttcttgtggttgggcttcaggcaacgcatgaacaaggggttgcacctggcagtggcaggaagaggacagcatgaggcctcagaaaaagaaggcgctcaacctctgagggtcatgaggtgggttaaggatgaggctgggtgctccgcccacctgccccccaccccacctctccatcttttccaccagatccaggagtgactgctggaacttggcggccacagtgtgcgccttgtagagccgagtgacggagctgctcttgcccaggcgctgaggggcagcctgtggggcatggctggagaagaggtgtgccaccacctgggcaggggtcggggcagggaaaacagacaggcagggtccgggagaccgaaatgaggaggaagagagagcaggagtaaatctccggaccagggggatctgaagactaactggacccctgttctctctgcaaggcctctgtcatcctggcttgcatgcttctcaaaacaggtggggctcagcatcttccaagggatccatcccataactggctttttccccttcagtctaaggaacacacagttactgactgtgtgcctggccccagggtggcctgttagatacatggttgtgaactctggctatgacctcatgaggaggttgcccagttgacaggaggaagcggagggccagataggggaggtgatgttaccaggcctgtgctctgtcatagggccatctgctggccgtagtgtagctgggatgcagggcctccccaagccttcaaggaacccaaagttggtcccccaagctcttccccggggccttatgggtggggtgggagaaactgagaacaccaggaggtgggactgggggaacaggtctggcaagaagccaggaaagaatgggccagggaatggggtggggcccagagtggggtaagtacagggcaaggccacagctggtggggtacagggttagaactgggagcggggccagagtctagccactggggctgtggggagccagaggacaggatcaggatgaggcgctaggtttagggcggagccaagctaggtgggaacaggccaggaacagggtgtccaggccacccttgtctttgtctggccaaagctaagcggagccaggacgtggcaacacggtcccaggcctgaaggcaggctgggtgtgggggtggggacatgcctgggggcagggccagagcggtgggaggcgaggcttacccgtgtccggctccgtacgaacaggtccagcacatcctggcgcacttggtcgtggttcttgtccaggaacttgtgcacctgaaaaggggaacaatggcctgggtaatcctggcctctgtctctctgtctatcctaggagggactggatcctcctcacttctatggtccccacccctccagcccccaccattctccctactcctgggggaggggagcattcgccatggcttctcatgaccaacctgggtcttggcctcaccctcagtgaaggacattgtcctgtgcccattctacagatgagaaaagtaaggcccggatggggacagaggcatggaatcctagcctgagacacctccagggcaggaatgtgcctcagataatagtgatgagggtgaccatagtgatgtcactattgatgagctactctttatcaaacccaccctacatttttcacacctgccccatgagttgggcactattattaccccattttccaagtgagagaactgaggctcagactggctaagcaatttgctcaaggtcacagagctggggcacagcagagccagaattggacctggctgtgaatgtctggggccagtgttgtgcttctgtgtctccaacagctagcagcactgcagcaccagcgtccaggccgactgtcttagggctcacctggtaggtgaccttgcctgcatagtgcttgatggtgaactcaggcagcggcatcttgggtttggaatagagcgggttggcgccatgatggtagtggcacttctgtaggaaggtgtggtctgtagcctgggggcaatttagggatcagtgggtgggcaggaggcctggacaccctgttcctggcctggtggcaacctcactatccccgactgctcccaactgagcaccagagaggaacaactcacagcttcccatggctgcccatctccctgggtcagaaggcgagtgccttagctaggcactggaggcctgagtggtcccttgaagataggtgtagctgggtgagctcctaactgcctcccctccaggccaactgcctttgcactctattgatctcactgccattccacccttgtgttttgcaatcaggatttgaggcccaattccaaggttacctactccaggaaaccttctgtggctttccagactggtgtagcctctcttctgaacacccacagcggcccatctggcctcaatcaccccaggttgtgaatagtaggtcgggtgtcccaaccccccactgcctgactcaggccagagcagagaggaatgaaggagtcagggtgggatgaggacatgaggctgagagatctgtgacctgactaggctcacacagtgcctgcggctcacctggggaaagcaacactggtcgtcaaggatccgcaggatgccataaggcttcagtgagatgaggttgatgcagggctggttgtcagcaaaggtgatctcctgccagtctatctgctcacggatgtactcctcctgcaggcagtgggcagcaggagctcaacctcccatccctgtccagggcccacccaccctccctcccatgttgaatctgaaggagcctggccagcagcacctctgcttgcatacctcccagaacagggagctcaccccctaataaggcagcatgagccaactcagggtcctgctgctccctctgcctgggacagcccagtagaggagaagaaggacccccaccaaggggactcctctctgagcacagcacctcagcacctttccctccagaacagaggccttcccatgggctggtccccagcttagaatgcctttccctctactgtctactgatgtcagaattgcccttaaacaaccagtatatcctcatctgtctccaaggaggtccactggccagtcaagacagggacaggagtattaatggggcccacacacctgctcctcctggaagacgatcttgttgaaaaggtactgaaggttctcgtttgcgtagttaatacacagctgctcaaagctgttgaagctcaggtcctgccaggtggatgggggtgctgggactggtccttccttggccaccagcctgtttgcccctaccttccctggtggcaacttcaaaaagctggagctcagccacaggccctcagctcacaaccctccacagctcctgctgcacccaggacagaatctgacaggctctgtcctgacagcacaggcagtgcctgaaggccaaggctctggggccttctgcctgggttcaaatgctggctctgccattttctagctacataaccttgaataacagccccatgcctcagtttccccatctgtaaaatgaggatactgacagtacctgcctcatagggttgctgtaaggatgaagtgaattaacaaagtgctttaaacagcacctggcacataacaggtgccacgtgagtgcctgtgatggctgcatggtgatcttgccctgtccctcaccacttcctttgctgtgcactcacaaaacagtcaccccccaacacacgaagtccagtcccagacctcatgacccgccacccctcccagcccttgcatattctgttccctgcacctacagtgcctttgctgggtctcaggagtgtctcatcctcatccaggaagccttccccacccagcctcacctggaagctccccaagggcagggccctggctggtcctttctgggcagctggtattgcccagcacagggcctggcccagaggccttgggagtacttgtggtgagtaaagaaaatggaaggagacaagggagatggtgacagggaggggtccatgaagggaggatggcacctgctgcaggcacagaaagggatgggaagggcagcccgagacgcctgagggaggcgagaccttgcctatgtcccccgcccctcagcctcctacacggccccacctcgaaaccatagatgtccaggatggcgatggacagtgtgtcctgccttggggacaccagcgcgttgaccctggtgatgagccagctgaacagcagtgcatacaagaccttggcgatggcgtccctggagcagaggtggtgctggtgtgagcaggacaccgtggtggggtgctgggcctcggggctcaggcaggggagggcgtggcctcacctggcatccacagcgctctccacagttaggggcgtgaagatcttctctcgcattgtctcctagggacgggcacagcccttgagtgacatcaggctggccactctgcctccggaaagcccccaggggactaagggagtgggatcatggagaagggaggctggagggatgttgtgactgtgcacacagagactaggcaggaccacccctgcccccactctgactctgcctggaaatgctggtagtagtggggactgcaggtctaatgggggagacagaggcatcagcagatacaatgagatcaaccctgggaagggagaatgggcctaggactgtgaaagaccagaggaggcactgacccgtccaaagattagggaaggcttcttagaggaggggatacctggatagggtcttaaaggatgagtaggtgtgaaaagaggaagagcattccgggtagaggaaacagcctatgcaacagtctgagactggaatctgaaatgtctctggggtctgaaattactcccctccatgcctgacccagggacagagagagcaggagagagggagaggctgcccacaaaggatcggcacaagcagctctgtccaggccctggtagaaagctttgttcgaaggccagatgcccacagactcacggtcactttgaaggtgatggccttctgcaggccctcaggggagatctgcagcagctctgccacggcctggatctctcgggcactcaccactgaggccacctcctgtgcatccgtctatgcaaaataccaacaggaatgtgctttgaactagataggctaaatttaaagttcatatgaaaaacagggccgggcactgtggctcatgccagtagtcccagcactttgggaggctgaggcgggtggatcacctgaggccaggagttcgagaccaacctgaccaacatggagaaaccccgtctctactaaaaatacaaaattagccaggtgtggtggcgtatgcctgtaatcccagctactcaggaggctgaggcaggagaattgcttgaacccgggaggtggaggttgtggcgagccgaaaccgtgccattgcactccagcctgggcaacaagagcgaaactccatctcaaaaaacttaaaaaaacaaaaatagccacgcgtggtggcgggtgcctgtaatcccagctacttgggaggctgaggcaggagaatcgtttgaacccaggaggcggaggttgcagtgagctgagatcgcaccattacactccagcctgggcgacaagagtgaaactccgtctcgaaaaaataaaaaacagaaacaggctgggcacggtggctcatgtctgtaatcccagcactttgggaggctgaggtgggaggatcgaatgaggcagggagttcaagaccagcctggcaacatagtgagaccctgtctaaaaaatgtgctgggcatgggacctagacctgtagtcccagctactcaggagctgaggcaggaggattgcttgggcctaggaggttgaggctgcagtgagctatgaaagtgccactgtactccagcctgagccataaagtgagaccctgtctcaaaaaataaaaagaaaaaaaagccgattaaaagaaaaaaaccagtgtagtcatagacacagtacataaatagattaacaaagcacaatagaacgtctggaattagacataaatgtatatataaacttagcacatgacaaagatgtatttttctttcttttttaaaaataatttttttttgtagagatgaggtcttgctatgttgcctaggctggtctccagctcctgggctcgagcaatccacctgccttggcctcccaaaatgttgggattacaggcatgagccaccatacccagctaataaagatgtatttttcaaatcaagagattaggacaattgagtaaccacctgggaaaaaagttggattcctacgtcacaccttactgggataaatttggatggatcaaagatttaagtgttttttaaaactcacaaaatccataaaaggtcttagaaaaagttatggaagaaggctgttacaattttaggaagtttctccaaaaatgaaaaagtttaaaatttcaaatataaaatttaaatgtactagaaaatattgataaatgaactatctaaaaataattttaaaacaatttgcataaaaaacccaacaggccggggcacggtggctcacggctataatcccagcactttgggaggccgaggtgggcggatcacgaggtcaagagagcgagaccatcctggccaacatgatgaaaccccatctctactaaaaatacaaaaattagctggatgtggtggcacacacctgtagtcccagctactcaggaggttgaggcaggggaatcgcttgaacctgggaggcagaggttgcaatgagccgagattgcgccactgcactccagcctggcgacagggcgagactccatctcaaagaaaaaataaataaataaaaataaaataaaataaaataaacaccaaagggctgggcgcggtggctcatgcctataatcccagcattttgggaggccgaggccggtggatcatttgaggtcaggagttcaagaccagcctggccaacatggtgaaaccccgtctctactaaaaatacaaaaattagtggggcggtagtggtgtgtgcctgtaatcccaggcagtcgggaggctgaggcaggagaatcacttgagcctgggaggcggtggttgcagtgagccaacaggagtgagccaagactgcgccattgcactccagcctgggtgacagagtgagacccctccccgccaataaaaacccaccaaaaaacattgtaaacaaagttaaaacataaatgacaaactggaatatatatttgcaattcatatcagacacaaagggctgatttccttaatatatataaggaggaaaaagatgaacaaccccaaaggaaaaaagaaaaaaacaggaacaagtgatatgtgcatagtgtaatctgaaagggaaacagagaaggccttggaaaagacggccaagtccagagggtgcgggccccatggcaggctgtggcgtcccctcacctcatacttctcaaagtagacgttgcccaggtgcaggatggaggccaggatgcggaagatgctgtcctggtcctcactgctgaagcccaacacctccatggcagccaggagccggcgaaagtcatctgcatcgctctttcctgctatctcacagttcccaccctgcatgagggcagaggctgagggtcagggagcttgggtggggctggggagccctccaggtcctgctctgccctgaccagtagtgtggtggcctgagttggtcactcaagctgtcatttcactctcatgggcacggaggctctgagcacggctgaggacggagttcatagattctaagtgcaatgtgtggcaggggttgtcacctgttgacctttgcagctgcccagtgatagtaatgaaaagagtagcaagtgtttactgagcatgtactgcatgccaggccctgtgctaagctctttacatgcgtttcctcatctaagcctcactacatccctgcaaagtggtactatgttgtccccattttacaggtgaggaaactgaggcacagagaggggaagtgtagaaactctagactggttggttctgttccaggttccagagaaatgaagtcaggtaggcctttcctgcttccgctttggacccagaagactcctggtccccctcactgccatgagatgtcttaaatccaaactcaccctccccaaatctccttcaccttcacactccatcactcacaactcggctcccaaggcccagccaggggcgtcggggtgggaggaccagggccaggggccttcagatgcctgctggcactcacctggttcagatagtagtaggtctcagcctcttgcaggctaaaggcctgcctgagctgggcaggcaacccggccagcaactcgtagaagatgtggtaattcctctcgtttttggcctgtagagtgggtaggtgggcacagagaagggagccacctacctaggtgacccccaggcacacatacaagcccaagcctgcccacaagtgcacatgcacacagtgggctgcagatgagaacacgcgcctctgtgatgggtgaggctcccagcctggtgccagctgcgggtgagggcagaagcagaggtgccctggtatgattgaagtttgagagggttctggtgggattttatttggttaggagaaataagagaaaagggacccgtcttctcttatgtgtaccggccacacacacctgcatacatgtgtgtccatagcccacatgtgcacacacagagcttcttgatggctgagcacttcctgtgcaccaagccctgtcctaggcccttgggacatagtggggaacaacgtagagagaagcccctgacctgatggagcccacctgctagctagggagacagacactcagcaaataactgcttaaaacataaaatatatgagacagggaaaagtacactggagagaaataaagcagtggacggggtaggggctctgatgggatggagaggggctgcgtttttaaatggggagcttcctgagtgggtgaaattgtaggggagacttggaggaggtgaggggtttggccaagcaggtgcctgaaggataagtgctcctgagggaaggaacagaaggtgcaaaggccctggcaggagcgtgcctgtgtgctgcggggcagggaggagccaccgtggctggaggagggtcggggaggggaggtcctgggctcacatgtacacatgtacgcatgtattcgttcattaatttgacgtctacctagccctaccaggggccaggctctgagtatctgtacctcccaccccgaccctgcccaacacagaggcctgggagggggtggcccacctgaaacacgatcctggatttctcaagcaggtactgggaggttatggcaccagagatcacgcccctggggtggggagcacagtcagctctcagtgagggtaggagggctggtgttggctccgaggggctgtggcaggacatggaagacactgcaaggcttttgggaggccctccactgtcccaactcacccttccagaaagatttccacaaacttcccaaagcggctggagttgtcgttcctgacggttttggcattaccgaaggactccaagaggggtgttgcctccaggatctggactccagaaggagatgtgggaattgaggggctaggcactgttctgggggcctgggtggggggcatagctggggacacccagacatgagccttcccaaggacctccctttatgagagatgaccagaggtgggctccctagagaatcctgaggtctctccagtgccccccagtgtttcccaccccatgctgcccaactcccacacagcaagccccatgcttccccattccagcctccatggccccccacagcagcccctgaccacaagccccagccctgcctaggacaggcctttggatgtcctttcctgcctgtccctccacccacacaggagcaggcacatccacacgcattttcctggacagacacacacacacacacacacacacacacacacacacacacacacacacacacactgagtacctttatcttcaagagcgtccaggagggaggacaaagagacagacaagaacagaatggagtcactagcaggaccgaccaccactctctccaggagactaggagcctcagaccagggagggactagtaaaaacctgtgaggctcagagaccccaggggtccaggcttggggactgccatggggtctccaaggtatgaaaatatgctgagtttgccttccaaacagctctggggatgtcctcttctccccacccccatggctaccaccagccaaggatcctccctggccttcctcactgttccctgacacccaggcccactcctgcctctgaccattggcatctcctgttccctctgcttggaagtcactgctcccacgcacctgcatgccccaccccccaaccccttacctctcacaggaaggccaccagaattctctctccagtagccctcagccccattggcaaactctctattttcttgggtattattgtctgtctccccactagaatgtcaaatcctacaggcacggatctactgtttgcacatctctgagtccccagcgtctacacagacctggtgcttaataggctctcaaaaatatctgctaaagggatggaaaaaggaatagcatcggctgggcatggtggctcacgcctgtaatttcaggagtttgggaggccgaggtgggcagatcacgaggcccggagatccagactatcctgaccaacatggtgaaacactgtctgtactaaaaatacaaaaaattagccgggcgtggtcgtgggcgcctgtagtcccagctacttgggaggctgaggcaggagaactgcttgaacctgggaggcagacattgcagtgagccaagatggcaccactgcactccagcctggtgacagagtgagactgtctaaaaaaaaacaaaaacaaaaacaaaaaacaaaaggaataccatctcacgggcagagctgcccaggggtgaccatggctgatcacaagctcccacctatttaagcacctactgtgtgccagacacattgccctgataatgccgttgttaacaatcccatgaggtaggtactaatatcacccctgttttgcagattaggaaactgaagcttagagaggtgaaatgacatgcccagggactccagagtccactcgagtgatgagcatgggcctagtgtgtacgtggcactttcttcagctgaggcacttcctcaggataatcttttagggaagaagcaaaggaggtccagtcaccacagaaacaatacctgtaattttggggatggggccagttccctccatctgtcccatttagtccaggaaatactgcacccattgcataaaggagtaaactgaggtccagagagggatggggctggcctgtgattgctcaataagtcaaggtctgcctgggctttcctgtgtactatcccttagtctgggaagcccttgaggacaggttggctgcttctctgttcccggtgcccagcatacagcagggcataaagccagcggatggagtgggtaaacaccagaagggtggaacctgtggtccaggccttagccagtcagggcagagcattccctgtgctacgtggttggctccagtgaggacatatgaccaaaacttgcccagtgagacggagctctgaatgtttcatttctgaaatgttgggagggttgatcattatggtgccagcttgctgaccaataggagacagattgaggatgatgcctatacatgggggagggtggagccaagacaagaaacattgtttaagattctggatccagccatgcctaaaactgaactggactgtttgattatctgaggagggaagagccatgtctaggaaaggagccccatggtcatcacagctggcaggcacatcctcacacattctgtgtgcctggcacacacaaactcccagactcagccacatccacagctccatccgtcctccctgacagctctctgccatggactgcaaatctcagctcctgcaccacctcactcctcccttcttaggcctcagtgttcccatctataaatggatacaagtgtacctacctcccagggttgccgtaaagctccggtgtgacgataactgaaggaacccagcactgtgcctggccacaggaggtgcacgaggtacacttacttctttccctgcctacctacctagtcattccacaagtctgacctgaaaggttttgaaaactctggagcaagggatgatctgtttggtcatcaggaggcctgggctgggatgggagaccctggcaggccaaggcaggcatcagagggggccaggccaggctggaacctgactgcaaagcctgagcagcctccacctacgcccccaggatcaccttgctgggctcgcccctggctaggacattgtgccatgtgcaaacctttgtgggccccagggttggggaagtctgggtctgtggttctggagtctgagctggcaggccagtcccaccttctcctgagctccaggctggtggtgcatccatcacctccctgccatctctgtgtagatgcctagcagacacctcttctcaacaaacctgctcctcctccactgcccagcctgcctccatgctgcctgtggctcaaaccgaatgtctggggtcaccctccgacagttctccctctcacaccccagtctgtcttctctgtaggttgctggctggctttgacctgcacctggacccaatctgcttgcacctcaaagtgcaggcgctcctccctctgcctcttcactgttcccctagactttcctagagcccactctcttgtcttctcagtacagcctaccctgaccaccacacttacgattgcaacccccaacactcgccacccttctcttcacttttttcctccacaactcaccacctaccctttcacatacacataatttacttatataagtgtatatatatatatatatatatatatatctttttttttcttcccacctccaccactagaatgaagttcccataagggtgtgaacatttgcctgagttgccgctacccctccccagtgcctagcctgggactggcacacagtaggtcttcagtagatctttactgagggaacggatgcagttctaccattctcaggctcagagggcttagcactgtctttgtcagcaaagctccaatccttcagactctggcctggcatctactgcctcccccaccccacccctaacccacactcaggcctgccctgcctcttgaccgctgggggctgcatagcttctgggtgtgagaatatggtggccccagggccatgaccaggaaggtgaggccaggtgggagagatgggatgactccccttccctatgtggactccccttccctatgtggtctccactctgaactggacccggagggctggaagcaggagctgccacagaaacacagacaggcaggaactctcacccctcaggcacacccctgggaagggtggcagaaaaagcagccctgggcaaggcccccttctggaactcagcctcctcatcttcctggtgggccaaggagccttgcctcttcgggagtacatgaggtgtgcttatcaaagggtgttcagcctagggtcctggggagacaggtagactcacctgctgcatgacctcccgtttctggttcatggcggccaggtagcgcagaatcagcttggtggcctcagttttgccagagccgctctctccactgaccgagcaaaggggcagagtgagctccaacctttcgctgcctcttctggggcaccctgactcccatcatgaagcaagaggatatgtacggtgggccaacccagaggtaccaggcaatcttccaaggtcccacagcagttctggccagatgcaggcctgctacctaaggtcccccatttatcccccacataaaggcagcccactcacctaatgattatgcactggttctgtttggcatcgagcattttggcgaaggcgagatttgcaacagcaaagaggtgcctggggagacaggtcattagagctggcccctgcctctaagctcccacacctcccagggattgggcagggagcatccgtatccagccaaacagccaatcctgcccacccctcaccctgttgggggaatgctcccacccccatcctggtctgaacgacagtggcctccaacctgtagcttcggccctgcctggggagagactgtcagattgagtaggtgggctgcctttccccattacctctgactcatggctcaggtgcagccgggatccaggctcccagagcaggggaaagaggggcccaagagaccccagggcagcgcccccgagacactcacgggggattctctcccagggcccgtccgttgtactgctgcacctgctccggcccatagattccaaacatttggtatgggttcaccgacaccaggatgctcccaatgtatgtctgctgggcagacggtggcctcagcgtcgtggctccttgcagacctctatgtccctccctcccctatgctgggagcctggctccctgtttccatccggacagatatctggctgcctggactcgggattcccatctagagccctctaccagctagctgggctacgtgctctaacagtggaatctcaggcactgcaccaggctgagctgagaggagtctggagtgagcaaaccccacagccacgatcctgggtgggctcctgcctacttcatttgttcaaggttgggcccaggctccaggaacttctggctcctgttgagggcaaacctccactgcctagagtgaggagttggggaactcaggggatcctgatgtggccagagcccttctgggtgtccttgtcttccacactggcactgagcccctggccctctgttctgtcattctcaggtcagaggctcccctctgacccctctggccatccccactctggggtccaggtctatggattctaggactctggaagttctatctgtcaggtcccagatggtgggggtgtcacatatttctggattctctgtctccagctttctgcctctggcatccaccattctttttttttttttttttttttttttttgagatggagtctcgctctgtctgtcacccaggctggagtgcagtggcgcgatctccgctcactgcaagctctgcctcctggggttcacgccattctcctgcctcagcctcccaagtagctgggactacaggcatgcaccacctacacctggctaatttttttttttttttgtatttttagtagagagggggtttcaccgtgttaaccaggatggtctcgatctcttgacctcgtgatccacctgcctcggtctcccaaagtgctgggattacagggtgagccactgtgcccggcctctggcatccaccattctaagactgtgttttaagacttcagattttagttctaggctctggcattctaggcagaggccacaggggctagggcccacaagagaaatctgtgcgtcccacccggccccaggaggcagctgccttcctgacctaggcccagggcagggccagccccaggccttacgtagatgaggttccgttcaaatctaatcttgaggttggacagcacagtggtttcctggaggtctctagaaggacacagagagaagccgtcagtgcccccagggctggttctggcatgggtctccctccccaactcagtgcagtgccttgatcagataggcctgaattcaagtcctgtttctgacaccaaccagctaggagaccttggacaaattacttccctattctgtgcctttttcttcatttgtccaatgggtatgataatcattgtacctacttcattgggggtttgggggacactcttacgtaatcactgtgattagataatgatgctgaccaacacggccctcatgttttgagtacctccaatgtgctggcatcctcacaacagccatcccactcccattttgtggatgagaaactgaggtgcagagaaacaaagcgatttgtgcaacgtctgccagctggtgagtggtggggctaggatttgaaccaaagtccgtctaactcacaaagcacaccacatttagtctttgtgacacttcatgactgaggctctgaaaatgtcctgggaggtgagaggcaactgcaggaggagctgctctggctgggagggtggggaccccatggtgaccccttgctgaccccgccggccctgcccactcactccagctgtgtcatgtcctccacaccatcctccccgtgctgctcacggaaccgcatggatggcaggttgcggatggagtgcatctgtgtgagagagagaggctgtgtctgcaggttgaagggcacccccctcccccactgacccctggcttggtcatacctggggcctgctaccattgttggggagggaaccccaaggccaggtgggtcctgcaggtctcctcattacagaatgctgtggcccccagaacctgcatgcgaccctcacacatgagacacacgcataccctcagtgcccaggcaggccctcccatgagctcccaagtgtcctgccctagggggtgaacaaaggcatatgcaggtacatgggcgcatgggccagctccctcccaaccgcaactcttccagcaccagcagaccccatatgttggcttgtgtgacaactcaaaggacacttgtgacctggtgcatggggcctctaggagggcagagatggagactgtcttagcaccacaaccccatgctcatcctggggaaaatgcgtggacacctgcatatggacccacactcaatggcatttacagctcatacaactcccaggcacacaggtgttcctgtaggcctgtgggcacatacgcaggcctgtggggcccggctggaggcacacggtgtgcaggcacatgctctacctgtccacttggcacatacatgtgggcgcacagctgggtccctccctatgctgggggtctggtgaatggaagtcctgatgccacctttgggctgcagggtctcctctgtgagcacacgtctgtgcacatgggcagagggtgggcaaacaaccctgacccccagggatgccacatctgctcagaccccatacactagctttcgtcatttggctgtggtacacacttgcacacatgctcaggcatgcaggcctgcgcaggatccacatgactgggagcacacacgtgtacaccctcagcctttccaatcccagctgcaccctgagcaggcgaggaaagaggacaccaggaaggaaccctgcatgcctgtcgctggactgctaagtagggcacagcgagtatcaccctttcggccctggcctccggcccacccatctgcccacgtgcttgccagcagccgcagaccctgaataattcagccactcacgtattccagggtaaggaggacccaggcatccttgcccctcacccctagacgccctgcgccccgctcccgcaacgctgcagcccacacagcgcggggcatccgccgccggggccagggccccctcagcagccaggctgccccggttgccattgttgggcccggctggctgcctgctccgccaggcatggtctgcagaggctgagacgcacctgctgcccctgcttgccccgcccaccaccccggcatcctgagagaggctccggtgaccacgcacctcagccaagggccacccagcatcaggctcgagttccaccttgagtgtggcagccaggcatgggctgggcacccatccgaagggctgcctaccctgcacccctcatggggttccagaaggactcctggttcagttttccctctgtgcaatgaggagtctggaagtttggatcctgagcccctcaccctgacctattccagaatcctgcagcccaggggacttcaaagggcagcaaaaaccctgaggaaacaggaggctttaatttgggggagggtcagtaggaggcaggaggaactgcagagacctggatgtgcggtggaacaggatggataggcatgtccggcagtttcacatctggcttggccaaaatctctgaggggaagttaggggccagacctgtcatccagattggatcagggcagggctgcccagggcccaagccgaatatgaacaaagatccttccccagagtgacctggaagcagtttcccacgtctctgtcctgggcctgcctgtgctgggcatccccttgttcaaccctccagaggttctgggaggtccaggctgttctccccaacttacagacccagagactgaggccccagcaagcagcctctctccaaggttgcacagggctcctcaggctgtctctcttgccctgtttcctaggccagaaccctcaaaccctccgtgtaatctgtgcctccataccttgttccgccagcttggcgggccgacctcctcccaggagcccctaagggacaggcaggcagctccagggcccaggtggcaggactggggatgggtgtgtactcgtggccagggtccataggcatctgcccgaagccagaggcaggaccagcgaagactacaggctcttggcttggggtcctgaatgggctggacttgaggcttcagggttgcaggcccaactcgctggaaagagctcagcttctgcacacgaggcatgaccacagcaaaacgcccaggggctgcctggcgccgttcaccccccttgggcaggggctctggggccctgatgggcgccaagggggctgcggcttggggcagtgttccccagcggtgccatggtggccatgtggccctggtctggtcacacgcagccagtgggtatgagaggctgggccttaatgtcttttgctctgggaggacatccttggggggagtgatatccttggggggagtgacatccttgggaggtgctggggttggaggcttggtctctgctggcagctgggggtcccccagggtggcctcttcttcaggcttctcaggggttgggccagctgatttggtgagctgtccaggccccggctcatggtgtctgcccaggaagaccctggtcatatcagcagctggatcctcaggctggagggtgggggatggcacagggcccaggagctggagaaaggggttttccggcacagggggtggcctggaaaagcctcggcggctgcctgcacctcctggccagggggagggtgggcgttgggtgggaggcatgtccacgtcccagctgggggccagtgggggcacagtccagggcgtctctgagtcctcgggttctcgcgggctctcccggtgttccaggggcgcccgccaggccccggccctgggcggtcggtggaagggcaggcgcacttgcggcttcacagcccgagtgggtggctcgctgaggcgccgccacgtgtgcgggaggcgcgagggcagattcagggagctgcgccgcgggctgtggcagagccccaggggcggcgagggcggcctgggtgagcccggcagcggcgagccgggtgggcccaggcgcccagcggctcggcgtggggctggggactcctgcagcgagcggggccggcgggccgggggcaggaagggcggctggaaggggcccgtgcgcaaggacagctgaggcgacgggggcgccaagggtgagcagtagccgaggcccggcgagctcctcagcgagggctggggcgaggccagcggtgaccaagctcgcctccgcgacgcccgtggagaggccccggggaagccgaaagccgcccctctccggcgggagcccctgaacgagggtcggggccctgggaaggctagtaggtcggggggcacctccgggctcacggcagggggctccacgaaggcccaccagctggcctgcggcgccggtggcacgtgcgctggggcggcccagggcggcgggtggcggcggagggagccgtagggcgaggccggccggggcaggcccgagagcgccggggagagcggcggcgcgggcgggggcccggagcttgggggccgcgggggcacgggcggagacaggagcgcgctccagtgggagagggtcctgggcgcgggctgtggcgcgggcgggcggcgcgcgtcgttgctgctgcgagcgcgtggctgggccctcctcagcacgatgggcgtgccgggcttctcggggtccatgccagccagcttgtagccgaagcgtttgtaggccgcctccctgacagcagggccgcccgcccgggccttctggctgcccctgagccgcgcgatgggcttcttctccgacagcgtcttcttgaggaaccgcgcaagcgaggtggcagggcgaggcacggggcggccaaactcagggccgaagcccaggccccggtgggcgccgaaggccgacagcgcgcgctggaggttgcgctggcgcggcgtgaggaagccccagaaagggtggccgtagggcacagcggaaaccgggggcagctcctcctcgtcctcttcttcgtccgcatcccccaaggggagaggaatgtccagagagggtggcaggggcacctccagcttctccttcccaaacagcttcacctggggtcgcgggaagaggcggaacttgcggatgagggacagcttggacctggcgggcttatccatgccttgctgctcgaagaaggcggcgctgggcaggcggaaggaggtcccctgacgctctacgcccgcgtcctctggttcctccagctcggcgatgtcatccatggcgtgggcatacgggttgtggggcgacgggatgggcggtggtacccaggggtacacaaaggccgaagccgactcctccgggtaaaaatagggcacctcgggggggtagatggcctcgtccccaccgccatagacgccttcggcataggggacggtgtagtggactccgtagggatcaaagtagggtacatcgtagggagtgtggtatgggaggtcatagggtgggtatggcgcgtcgtacggcgcatagggatccaggtagtagccataagggtgcgcctcgccctcgtacccatcgtggtagctgtaaggagacgagtaccccgacgggggcgcatatgggggttcgtaatcgtcgtagccgtagccgtaggtgtaccccggatcaaaggggccaccgtaatagtcggggtggtagtagtcgtagggatcctcgggcgggtacccgtagtagtggtcgccgtagggtggccaggccgggctgtaggggccgaggcccgccaggtagggttcctgctcctcgtagcggtggagtgactgccggtcgtagtagtcgtcgccgtcgcggtgatagtcataatactcgcccaggtcctggaagccctcaagcccgtacagcgacttgcgggagcccgagtgatggaatggggcctcgtcctcgaagggcaggaagcccaggggctcgcctgacgcgtagatgctgcggctgcgggggaacctccggagccggcccccaggccgcaggatctcggcacccgacgggaaggggagtttgcgggagcccatgcgggagctcgagcgctgcagccaggcgtccactgtggcctgttcgctgcccgactcctcggccttcttgaggaggaacttttttgtgagccagttgatggccgtggacgctttgctgagtgaccgggcgcgcggccgcaggcggccgtagccacggcggcctgggaagcggatcaccatgaaggacggcttcttgcccttcatcgcccgcttcttcttgcccatgcgcatctgcgtcatgagctttgacgtggacttgagcacggtgcgggccttcctcttgcgcttggtcttctgggggccggtgtggaggccccagaagaaggccgaggcgctgcggaactggcccttcttggagatcttgggtgtacggtcgcggaagcccatgaacagccgcgacgtccccttcaggctccgtttgggcttctccggctccggtgccttcttccccttcttccctttcttggctttcttctcctcatcttcctccttcgccatggtggctgcctgctctctacagggcctggggccggtgtcacgggctcagggacttggagacacagggacctgctctgtctcttgcccgcggctggacacgcggcctcctcgggctgtgagcagacccgactggccctgggtggcgtggggagggccgagccaggattccgggagggcggatccataattcatctcctctagagcgccttgggtttcaccctagagcagtagtagaaagtgtgtgggtgttgtttaccaggatggggaagcctgcctatgaggcctgtgctgggggagacattctggcctcggagtcgtcatggcaacatcagtgctcatcctggttaggccctccctgggccacagctggctcaaccccatgaagggagcccttgggtcacttcggcttcacagaggaagacattgagccacagagatggaatgccacctgccctaaatcaccagcacacctgcactgggccagaagtggggcctagggtgggatggccaaagcccaccaagtcatcttggaggagaactttgaaccctctaggtcctaggcaagggaggaggggaatgggcagagcaggtgctgggctgcggtcagtgtaacaggagctggctggctctcaggagctgaataatacatggggtggggagccaggctgccggctcagaaggcagggcaaggaggggcgtttcagtggaactccacttgtgtgtgtgtgtgtgttggggcgggggcaggggtagagaggcagaaatggaggttgggtcaggcctggctcagaccctaggctctgtcactgactggctgtgtgggtccaggaaagtccttgtcctctctgggcctcagtttcctctgaagaatgggagtgataagctatgccccatctccttcaccaaaaggaagcaagacctgatggagctgctgggtaactggagatgcctcctgctggctcctttctggggtccctgcctagccctgtcctctcctcttactttctgccctggctgagtaggctgtggccatgtggttactgccttctctgggcatagctgattgcttcatatggcctgacctaaggctgcatgtccaaagtctggttggtggccagtctaactcacttttgagaacctgcactaaaagaggtagggggtgggaaaaactgggcaggccagcggaggtggggagtggcagctctgagacctgaagcctcagaaccagctctcctcctcctcttcctcctcaagatggacctcaactcactgaactctggttcactcttttggtcccagagctaattctttggttgtttaaggtttagcataggagaccccaaagcagcaaggttctggccctggttctgccacttgccagctccacgccctcagatcagtggcttcagagcctcaacgtgctcagctgtgaaacagggacagggtgaggccttcccaggtaagtggcaggagcagagaggggaccatgcagcaagtgaggtctccccctctctgtctgcctcttccccctgctcactttctctggctcttcactttcctcttcttcctgctcctcctccccaagattcacctggagccagtcagtgcccagccactcagaggagttgcaccaggggctgttggtgcctggtgcaggcagtctcacagggatggggagtggggcttgatggaaaccagagaaattggatggagggcttttggagcgagttaggggatacgtgcaggaagtgggcctcctgcacagcaggagtttgaggggctgcccactctcccttctgtttttgggcagtggctcttgcccgcttgaggaaaaatgaaggacaggggcaatgttctttctttctttctttttttttttttgagacagagtctcgctctgttgcccaggctggagggcagtggtgcaatctcggctcactgcaacctccgcctcccgggttcaagcaattcttgtgcctcagtctcccaaatatcttggattacaggcatgtgccaccacgcctggccaatttttgtatttttagtagagacggtttttaccatgttggccgggatggtctcaaactcctgatctcaggtgatccaccaaccttggcctcccaaagtgctgacattacagatgtgagccacggcgcccagccgagacattctttctgagcctggagatatcaacaactgccccagctcctcttggagccagtttccaaagtgaggccccagtcaggtgtgttgcacagtggtctcatgggactctcacagcaggtctgtgagatatgagctattagtatatccattctccggatgaggaaactcagactcaaaagatgaagggacttgctcgaggccacctggcttgggaaggtagaacccaggcctggccgagtccagagctacctcccttactaggccctcctgcccgctgagctcctgggtcatcactgggtttagagtggcttaggacactgggcagagccaggagcatagtcgtgctaaccccacaacctgctcctgcctggagggggagggccctgaccaagccactgggcaaaccagagcccagctgggcctccaacaggcaccaaggcctctccagtgcttgcccaccgctaccccaacctggattcctcagtcagcctggcccctttccctaagggtcctgagccagcatttactcactcacccattcattcaaaagcctctgtgggaagtgtgctgcatgctaggcaccgtctaagtgctgggacacagctgtgaacaaaacagagaaaaaccctgccctcatgcagttaccatatgtgggtggagagaaagccaataaacatggaaaatcagtaacagataatggggcgtaagtgccgtggaagggacagcaagaagtggggttgtgacattaaacaggaagtcagggaaggcctagtggctatggggccatggagagagcctgtgggcagtgcacagtcccaagcaggtggaggagcagacaggccaggtggctggagggcagtgggggtgcactgggtggtgaggtcagagttcaggggcacatgtgcagggcctgtgggccacaatgagggcttggcttcgactgccagtgaggcaggagccgtgggaggagggttttggcagagaagggatggaattcgacctcagtcttttttttttgagacagagtctcgctgtgctgctcaggctggagtgcgatggtgcgatcttggctcacggcaacctctgcctcccaggtttaagcaattctcctgcctcagcttcccaagaaactgggattacagacacacaccgccacgcccagctaattttgtatttttagtagagacagggtttcaccatgttggccaggctggtttcgaactcctgacctcaggtgatctgcctgcctcgacctcccaaagtgttgggattacatccgtgagccaccaagcctagcctcgacctcagtcttgatagcagcctctactgctatgggagaagcggctgcaggagtgagggtgaaggcagggaggccagcatggaagcttctatggaggtcctcctgcaccaggctgccagcggttaaagtgtggagaagtggtaggatgctggggacatgtggcaggtaggactgacaggatttgatgatggggatgaggcagggtgcaggaatggctcccaagtttccttactgaacatcagggagaatggagaggccgtcaggtcattggccaggatgaggaaggctgcagacagagcaaattgaggaagtagggcccaggatccagctttgggcactgggcactgctggggggccatcacagccaccagggctggtgacatcagttagggagtcattggcatctagatggcattgaagccacagctctggaggatgacaccagggaatgagtatagagggaagagaggccacggaatgagccgcagggctgcagtgcttaggagccaaggaggcagtgagtgagcaccacgaagccagccagaggaggaggtagaggcccaggagggagtggggtcctgggggctgcacaggagggcgggactgctatgacagatgggaccgctatgacagatgagcatgttagtcaagaatggagagctgactaatggatgcagctccttagagctccaggggtgactgtgacaagaatggtcccagtacagtagcaggggcaagggaagttacacctgatggaagaggtttcaagaaagacaggaccagggccaggtgcagtggctcatgcctgtaatcccagcactctgggaggccaaggcaggtggatcatatgtggtcaagagttcgagaccagcctgaccaacatggtaaaacctcatttccactaaaaatacaaaaattagctgggcgtggtggcgcatgcctgtaattgcagctactcaggaggctgaggcaggagaatcacttgaacctgggaggcagaggttgcagtgagccaagatgaagccattgcactccagcctgggcaacaagagcaaaaactccgtctcaaaaaaaaaaaaaaaaaaaaaaaaaagacaggactgtggtggtcacaaggtgggcacacttgtgagcatactaaaaccacagcattgtacactttgatgggtgaattgtatggagtgcggattatatattgattgttttaaaaaagaaaaaggacaagagggagggaaggaaggaaggatgcaagtaatccacccctggggatctctcttacacgtccttatgggtaaggacacacaaacagagctgctcattgctgcagtacaccacaatgcattccaggatggaacacaacacagctataacaaggaatgtggacgatctctgtgtcctgatagggagcgatctccaggacctgctagtgcaggaagcaggctgcagatcagcctgttgactacagtgtttactgaggcctttctgtaggaagagtgtgtgtgtgtgtgtgtgtgtgtgtgtgtgtgtgtgtgtgtgtcaggggaggtgctaagaatataagtttgtattcttatgtttgccttttttttttttttgagacagtctcactccgtcaaccgggctggagagcagtgatgcgatctcagctcactgcaacctccacctcctaggcctcagcttcctgagtagctggaattacaggcatgcaccaccatgcctgactaatttttgtatttttagtagggacagggttttgccatgttggccgggctggtcttgaactcctggcctcaagtgatctgcccacctcatcctcccaaagtgctgggattataggcatgagccactgagccaccatgctcagcttgtgtttgcttttttatttccatattagaaatactgcagccaggagcagtggctcatgcctgggcactttgaaaagctgagatgggaggagcccaggagtttgaaactagcccaggcaatataacgagaccctgtccctagataacaaaccgaaaaattacaggtggcaagcacctgtaggcccagctactcaggaggctgaagtgggaggatcgcttgagccaggattttgaggctgcagtgagttgtgatcatgccactgcactccagcctctgacacagagcaagactctgtgtcaaaacaaacaaaagaaatacagcgccaggtgtggtggctcacacctgtaatcctagcactttgagaggccaaggtaggctgattacctgagctcaggagttcgagaccagcctgggcaacacggtgaaaccccatctctactaaaatacaaaaaaattagctgggtgtagcagcgtgtgcctgtagtcctagctacttgggaggctgaggcaggagaatttcttgaacccgggaggcagaggttgcagtgagctgagatcatgctactgcactccggtccaggtgacagagtgagactccgtttcaaaaaaaaataataataatacagcaaaagatacataagaaattaatgagaatagttatctcactgtaaatctttctatattagtttgatttttatccatatgaatgcatttctgagtcaaaaaccaaaaaaaatgtaacatttaaaagtgtaaatgtgggctaggtgcgctggctcacacctgtagtcccagcacttcgggaggccgaggcaggtggatcactcgaagctaggagttcaagaccagcccagacaatatggcaaaaccctgtctctactaaaaatacaaaaatcagccgaacatggtggtgcacacctgtaatcccagctacagatatgcacagtgtggtggctgaggcagaagaatcacttgaactcaggatgtggaggttgcagtgagccaagattgcaccactgcaatccagcctgtgtgacggtgcgagaccctgtcccccacgaccccccaaaaaagtgtatatgtgaaaatggaaaaaaaaagggattggagactgagtggaaacaccactttagaggggctctcaggaagaatgtcagggacctgagatgtcacaggtccaaccccacccccaccccagtgtcatgtaacatttgttacatttgttgaaagtgaagcagagagaggtcagagacttgctggggagaagcagggcagggctggcccttcaggcccaagagcacctcccagagccataccttctgtctgccccaagtaggggagccttgtctgtctgtccagaagaaaggctgagaggccaccattctctagcgggcttgcccaagtcctgcctcaaagcctcaggcaggcatctttccactgcaaagccccattgtccagatgaagaacctgcctctcagagaggcaagcccagctctagcccaggggacgtggagcccagtggctcagagctctgggtcaggtctcattcctctcctggatctgacccatagcaagtcatgcagcctcagcgttggagtctcctcatctgtgagtgtagatgcctcccttaccagggctgacctgggcattacatgagatagcggagagctgggcacagtggctggcctgggcaagcagctgttgttatgactgccaacgtcattgctacaggctgctgcctgtctgctctgagtgaggaggtctgggtgactgctggcagcaagtcctgcccacctgatccctcctggtctctgggtcccaggcttgacctcaggatagtagtcagctgaggctgccccttctctggtaggttccaggtcctgccttcctctcagggtccccatcctctgtgcaggcacagagcgggtgtcagggagcaagtctctcattcattcattccttaaatattacttgtgcattagttgtgcatctattatgtgccaagcactgtgcagggcacttggggttcgcagagttaagtggaaccagacatgatctctgctctcatggagctccctgtgttgtaggggacacagactttgtttttttttttttttttttttttttctcttttgagacaggctctggttccatcactcaggctggagtgcagtaacataatcacagctcactgcagcctcaagctcccaggctcaagcaatcctcccacctcagctgcccaagcagctgagactacagaggtgggctaccacacctggctaatgtttttttgtagagacagggtcccactatgttgcccaggatggtcttgaactccttgcccccgggcaatattcctgcctcagcctcccaaagtgttgggtttacaggtatgatccactgtgcccatcctggatgcagactttaagcagagtcacatcaacaagaagagctgtgaaggtcagggcatgacccacagatgcccaaacactgcactggaggtccaggaagattctgctgacaacgcaaccctgagccaagatctgaaggataagagggagcttataacatggaagaaggaacagtattcctggcaagtggaacagcatgtgcaaaggtcaggtggtaagaggggcttcaaggacagtcctatggctggagcagagtgattgagggcatgtgaaatgagaggtggccagggtggcaggcagggactagcccaatggccgtgaaagggatgggactttggtcactgtttcgcatttccagatgtttactatgtgccaggcttggtactaaatgcttttctggaatatctcactagattctcacatagatgaagggcttgatcttagagaggttagatccctcagccgagagcccacagtgaggaagccatggggcctgtgtccctgactgcaagacctgtgctcagaacggccaggccacacagacctcaactctcactacaacctcctgaagtcggtgtggttactcttcccactttacagatgaggacatgggcccagagaggttatgtgagtgacacagcttgaaggtggagttaagcctgggcagtctggcttcagagtgtccacagtctcaaccactgcctcacatggcttcttagaaaatattataaaaagaagctcgggctgccatgtggaaaagaatggagaggggacaatgacacagctgggagcatgctgtgatggtgtacagcggacacattcaggatgaggtgaaacaggctggccctggtgagaggctagatggggctgggatgagggtggagacaagtagtcttggggttggcttggtgcagctggggggtgcggggagtgtctctgaggtgaggccgggggtatgggaacgccatgtttggtctgggacacggtgggcttgggatggctacaggacagtgcagtggagagtcaaaaaggctgctcggacccaggtctggcgagatggaagctggaggtcaggtgagctgtctaggagagggacagagtgggaaggagagggtctcgactcggctttcttgccaaaggagggttccgaaatgagaaactgtggaatctaagctggagaggaagaaagacggagaatgagtgaacgcacacgtgtgggacagatagatgaatattcatgtctttggctcctatgtacctgagtcttctaaagctgcaggccatactacccccgggaggctgcagggatgccagctgggagatgaatgcaactctgctgcctgggcatgggcctgagtgagggtgcagacccctgcctgtgatcatcagggagggtgatgagaacaaggtggctgacagggtgaggcccaagcctggagcttacccaggtgcggggatgggagggtcagagacctttggggggtcttagggagcttccccagccctaaaggcaccgcaagctgccacttcacactgacctgggcatacgcagctgcaggatcccttgctcgctctctcacaagcaaatgtagactgcgcaaccatcctgaccacagatccagaaagcccaggacataacagagccgcagtgcctgccctgatccacgcgcacacagatctagcccaggaacaagcccatccacggtgaggaacttgtggcccagtggctggagcctctcacctgagccctcactgcctgaggacccccagcctctggcctcatttcccaccctttgccagccagccttggggacaaaacaggtctggatctaatccaaggtctggactcaccctgacaccctgtgaactcaaggccttccctacctcaccctgggcccagagcccctacctgtaaagtggaagtgggaatggccaccagccaggcagaaaccctcacttagggcctcatggccaggcatcaggacagtcaggagaggggccgaggtaagccacagaggccctgcctgtcttggtatcccaccatcgccaggaggggactgcatgggcatcacacccctcacagatgaacaaagtgaggcagagaagggcctcaagatgagttaggggcgaggccccagctctgctgctgccccttcccttatcacccctgcagcctgggatgcgagggtggccagtgacagaccccaaggactctaggctaaggtctccttacctgcgttctgtggcctgctccccgcctgcatgccgcctcatgggggtcctctggctggcccaggagcacggttggcccagcagagcagctcagtgttatggggaagggaggcccagcccaccacgccgaccgcctggggccctatgtatatttaatgatgtctattattcctgttttgtctctggaaaggagtgagcagctgacaggggagccacgaacagcctggagagctgagcatgggcctgctccacactccagcggggcccgaggcccccgggaactctacccctcctggcagcctcacagaacctgctgcatccatctcaaaaggcatacctcctccaggaagccttccccgctgctcagaggtcttaaatccggggtctgcactcacaaactgtgcagcctacaccagcttctgggggacagcagaacactgtggggggcctggcacagtccctggcacacggtaggcactcatcgagcccctgccagcccctctactcctgacttctgaggcaacaggaaatgacccgccaccttgttctcacagagcctccctgccagcccagatggtcacaagggcctcctgggatgctgcccaccttggcagccaggcccctccggaggggccagtctgggcctgacacccccgaacaccaaccccctgggcagagcctgcctgtgcctgggtgaggaaccctgcagtctccttgccacacaaggcctgggtctgccttggggcccaggctgcaccctctccgacccccaggcccaatgtctgacctgtgcccacctgactcaacctggctactgttcagcaagtttacaaagtgttctcagtctgaacaggaaccgttttcaatcctttatttcagaaaggagagccaggagaactggggacttagaaaatacagatcctaaactcaaaagtccctgccccaggcgtgcagagccagggtcctggggttttgtgctgggcaggggctgccctgggagggggaatacagggggaggcactttaggacaccccttaggctgtggagggtgtcagctgggcctttgaagccactaaccactggttcccatcatggagagccctgtgtggggcacccaagggggtttcctcctggaagggcccccaacccaagtgtcagagaagctggcaagagctgagggagtgaggtgccatgacagcagccacagcctccagggacccaaacaggcccagctaccagcctggcactgagcatgccatctgctttaggccctggctggcgggcatgtgggcaacttgctccctcagtgcagggggctgggaggcacagatgcaggctcagcactacaaactcaaaacccccatgagagggctcagtcttatgggaaatgcctccaaccgagcccctttgccccaacacactcttcgtctgcctactgaagaaacttctgtaaatagcagagacttgagggaccccttcctggggtacgtgtatttgtatttttctgtttgggtgtttgtgtgtcccagtgggaccacctccccagggagacgaggcaggtgggcgggaggcccggcaggcgccgttacttcttcacgatctggatgacgtcctcatgctccatggtgtgggtcaggcccacccgctgcggactgtacttggtgctggtgccctgggtgaggaatgggggcagaggggtcacctcagcctggactggccaaggtcaaggaagatatccctgggcgtgtgtgtcctgaagggtaaatgccatggcataaggtgggggcctcaggcagcaggatgtccgcagttgtctgaccatccctgatctcaaaggttggggagggccaggcacagtggctaatgcctgtaatcccagcacttctggaggtcaaggtgggaggatcacttgagctcaggtgtttgagacagcctgggccagatagcgaaaccttgtctccatgaaaaattagccaggcatggtggtgtgtgcctgtagtcccagctacttgtgatgctgaggtgggaggatcgcttttgcacagatgtcgaggctgcactgggccatgatcgtgccactgcactccagcgtgggagacagagccagaccctgtctcaaaaaaaaaaaaaaaaaaaaaccagaaaaaaaaaagggtggggaaggcccatgtctaccctgggttggcatgtacattctatggaggacagacacacagacatgccaatccccacaggaaggacaggaacaccacgcagagagtgtgaatgccttgcttcatgcctaacccaggggctgtcctgggtctacccccctggttgctttccacccagagactcacccacaccagggcgtacttgaactggctggcgagtgaccggtggatgcggtggcactggaggacaggagagagtcaggtagagaggtgaggcttcacctaaccccatcccaagcttggctgcacacccaaagctcaggacacaggccaagaggcaggagttcccgcggcaggtgcccacacagtctgggccttgtgtggaggactgacgtgctcaattcgcacatagccacccaatcacagctgcaggtggccctgccattcccactcctgatctgccagctgtggtgcatagttaggaatgttcccaaagccaccaggggaaggtcaggggcctggctgctagtggccctctgcttgccttgcctgaacagatgctcctttagaatgggacagggtgatagcttggagtcccccctgcttggtcaccatctctcactcctcctggccccacctgtggcctgaagcttcccacacatcacatcacccccaactcccagggcagtgtataaacttcagtgctccttggtaggggtgaagatcccaggggtcccagatgtcatataaaactggaaggagaccctggaggaggcagccagcaattgccctgagagtgtagacctctggttgccacgctgatggtggcacagtggagggcggtggggaggggactctgcaattgtgcaatgtgactcctcctcccacatgcccacaggtcttccaggccctggtgggagacccaacacctcagcccagcgtccctggggcggaggccggcgccaggcctgcaggaacacttccttgacacagatgggaaggtggctgactctggtctgcagatgggttttgttttactcagcttgcccagcattgccacttgtgagtgactgaagggattcaggagggtaatcgtgagtctccttggctcctcctgctgtgatctcaagcctaggccctgagggagatgggactttgcctggcctcctttgtttaacacctctagggtggcactcagagacctggggctgggcttgcggaatgaatgaatgcatgagaccagattacaggccctgccaccactgtcctaaggggctgcagggacagctgggtctacagcatcccttgcctccaggatacagatcccaagaagaaatgagctagaggaaaacaacaccaggaaagcatcagcccaggaggacggccatgtgacctgaaggttggccaccatctgtgcctgcagggtcatgttcaggtgacagaatcctggacagggaaaggcagcctcttgctccctgagcccagaccacctcccctggggcctgtgcatgcctgctcccctacctgggatgctccccaccccaactcttcactgccagacccactagtcctataagccggctcaggttgcctccttgaagccgctgtcctgacctctgtgttaagctggtgccactccctactctccttgactgatgcctgaatggcatggaagcagggttactggcatctctgcaaagccaggcagcatgctgagtgccctacacactggacctcattcaacgtgtcctcctgactatccagggggcaggcagcacacccccctcacagtagaggtcagagcctcggcacatggctaagaaggggtgctgcagacgcagccccaggctgtccaactccagagcctgcgttgacatctgagagtgagaccagcagagcccacccccagcccagggcacctcaggcagaacagagccccaaagggcatgcagagctcccaccccttgtcacggcaggtcttgtcaactcaccacgtgctccactgaggcccctttccggagaatgatggcgtctgtgaagtctggcctctctgcagggcaggatggggagaacgtcagccacacatcagggcccacactgccatcttgtgattctgcgcgagggaagagctggccacagaggccctttcggtctccttgccttggcctaacctccccctgacatccagcacaccctccacatagatccctgtaccatcttctacgaccttgatcttaacacagtgactcaaaataaatcacgtctaggattcacagtgcctgccacccatctgctgtgacagcactgacagagaccaggacctggactgaacgggcagggcgcaaagggatgctggagtctagtgagggaagctgtagctcactccttgccaaagtcagggttgatgcaaactgctccgaattcagctgttgggaccccagggcatgtgtgtgtgcgcaccaggaggatgggcaggagttagacatggggatggctcctgtggattcaggtccctaatgctcctgcggtagggcctgtcactgtgaggggaggtcaggagggcactgactgctacagccagtggggaccccaaggtagccttgccccaccagggtaccctcaaaaccagcagtgcccagtgctgagaagggaaaagagctgaggtgtgtctagacaagccaggccagagccggtgctggggtctctgggcaccacacaccggcctggcagccttctagggatgaagctcagcctgtttttcagctacgcgcagtgcaactcacgtcctctcttcttggtgtagatgcaggtcagggccaagtactcccaaagcatctccagcagatagtccaggttcagcttcatgccgcagctgcaaagagggaggcggccagtcaggcaggggcccctgtgaattcagaggctggggtctccacttctcactattggagcggataacctccactggccaggtggcccgctggtacccacagggaaacaagcccattactatgatggcagcctgatgtttctgctgccagtgcctctgggcaccaatcatggtcacactcaaccagggtcagcatctctcctaggggctggcaagcctgtgctctgtggagggttgcagcatgtgtgattagtgaagggctgccatggcgagatggccgggggctgtgacgggaccatgggcaaaggctaggaaccctgacacccagagttcactccttgagaggagcaagggactgccaggaagtccagcagggatttcagcaagaagaggggagaaccaaggctctggagacaccagagcctttacatgtagaacaggcatgaacccagtccctacctcgcaggactgcagagggattaaaaagataaggcccgggatgtgccttgctccaaatactgggtggaccgtggcttgaaggtttgcgccgtgaccccgagctgtgtcctgacctctgtagagctattctgagcacaagcaggtaaaggtgtagaagctctcacgccctgaggatggcagcccctcaaaggcctgggacacagcaggaggagaggacctgaggctgtgctgtagaactgacactgctctttgtggtggctacaaccaccacaaaatggtccttgtgctcaggccgggaccctcatccatcatttgcgctgtccagcctcttggtccctgagctctcagtactgttggccaagcttcactgtgaagctgtggagtgcctgcctcaagtcaggaaaccagcaaagtggagcacctgaatcagtctgccccaaagaggagcctgccaggctgtggtggcaagtgaacaaacatccagagtgcaggcggtaccccagggacccaccctgcaaaggagggcaggaagtgagtggccagggcctgagaacattagttccctttttccctttgagctgtgatcagacagaagccacaccttccagagcaccaggagaggtaggctcacacccagggcttcttggggggaccttggttcactactaagttaagaagcctctttttttttttttttttttttgagatggagtcttgctctgtcgcccaggctggagtgcagtggcatgatctcggctcactgcaacctccacctcccgggttcaagtgatcctcctgcctcagcctcctgagtagctgggattataggcacacgccaccacgcccagctaatttttgtatttttagtagagacagggtttcaccatgttggccaggatagtctcgatctcctgacctcatgatccacccgccacagccccccaaagtgctgggattacaggcatgagccaccacgcctggcctaagttaagaagcctcttagccattcaaccttggttgatgaaatccttctgttttcttaaccagagcccacaagacgtcacccaccctgcccacggcaattcagaactggaatgggccaatgcctccagcagctatgaaggggaccctcctgcagtgtctccttggcctcatggacaaagtgctctgccctgggcaggaagtcctgggctccgtgacggctgtgtgctgctggaggctgtgctggcttttcctcctccacagccaaagtggctgggaggcctgacgactggggtcagaacccacagcaaggacagcagagtggcaggatgccagtggcctcacctgatgaccacactgttgggttttcgggccaggcggtccacctcttccatggagatctggtcgattttgttataaacctgagattgagaaggtggaggccggtgctgaggacaggagcaaggcatccaggaaagggccctccatcgccctgtgccggctgcagcccttccttggagagctgagtctacgcccttcctccccttgctgcctcagggttgggaaggctgggctggaaccctggtttcaagctctctatgtctgcaagatccaagcagccactgaggtgaggtgaggtgaggggagagcctcagactctttctgcttctctcacaaggttccgggagctgaggaaatgcatgtggtagaaaggccgagtggccaggccagggctcccctcctgcacttacatacaggcagggcatgtacacccggttgcccacgatcacatcgatgaactcgtccggggagcagtcttctcggaaaagcacttctgcattgaagatctctgaggggctccgattaagggcaacctgtgcaccagctgcccctgtcccccatcagcggagggccccaaaaagccaagcaggaaatatgctggccgtgtgggaccgtggcggtatctgcttgtgaggttttgcaagattgtaatgctttggaagccctctgttctcttccccagagggaccacaatatataaaagtttcaatcaacacagagttttaatcttgacagctaggcagggagaaaaacgtacctgctagaatccccaaagcccctcaggggaagcctgggttttagcaccaggagcatctgaaagctggtcgaacccagcttcttccatgcaggactccactgggggccatcctgcctctgcttgcacacctctggcaacgaggggctcacagctgactctaagagttctctatatgccaggcataactctgcccaaggccctgccctatccccagggccccagaacacaaccagcccccgacactactttagaggcaccacccattccccagctctccctggggcttctccaggctaggaaccccccgtcctcagaggctgtttcccatgacatctttttcttccggatgtcatctggctaccacagtgcccagtacttggtgaggagccaggaagccattgtcaagtgcacggctgcagacctggcagtctggagcttgcccagaggctacttgaatggacagcaggggcagtgggggtgacctgctgccaccctgctccatgaggcctcctgtcttagtcagtccccccgctgcgctgacggtggtggctgccctccttcacgtgtctttcagggaaggatactgtattcgtgcaggatgagctgcaccagcttttccgagcactgggtcagcgtgactgtcgagttaaaggagatgccaccacctttcttgggctgaaagaggagaaagggatggggagaactgctgaccgaggggtcacagcaatggtcccacagcctcagccgccagccaatgcagtctcaaaactgccacacccctggcctgaaggccagagaggtgcctcaccttgaagtagatgttaggcttgtgcttgttgaggcggatgcccacagactccagctccttctccagcagagacctaggaagagtaccccttaagcccctcacaggctgtccacagagccagatgcacagcttccctgttacgcaggatgtcactgcccacccagagactgactctctcctccacccccttccccagcaacccagagaacactccttcccaatgccctagagctgcagggaacttctaaactctgccacagtcccagaggggactggcccggtttacggtcggcatgcacaggcaagtggtggagcccccgcgaggtgaccacatgagggtactccttctggtcccgaggaggcaggcctggtgtacccctctgccaggatgtggatgaacaatgcttctgtgcctggggctgggctcctggcaggttctgggcagtgatgaggcacctgtgcctctgaacaggaagcagggccaggccaagcccctcggcccccagtcccaagatacctctgtgctggctggacacaagccttgaggagaagacgccataggctgggtggtgttgggtttagtctgtgacaagtcctaccactactctcacgtgtgagagagccaaacacccacaggccgcctagtacgagctcagggacacattggccctccccagacatgtgagcctgccccatgccccaccctgcggacctctgcacctctcccttggtggcatccagcatcatgatgatgacgtcagccgtgcgcgccacagcgatcacctgccggccacggccttttcctggatgggtgtgagggatgcagttacatatgtggacccatgtgactgctacccagcccacggcgccctggactcctgtcctttacagacctaccacagcctctgccacatactagcacaagcttggcatttttctttaatccacatgttttactgacggagacttatttcagaagaaaatccgacaccaccatcataaaaggagtaacaggataataacggctgtcctacgcccacccctaccatgtggcagggcccaggctaaatgcttcctgaacatttcctcacttaatcctcaaaactatgctgtaaattatgtattattatgcccattctacagctgaggaaactgaggcttggcttagagatacccaatcacttgcccaagatcacaaggctagtttggtgccaaggatttgaactggaacctgtcttttctggaaagcgggataatggaccagggatccagagtgatctccatgacagccacacccaatttcaacgatcagtaacagagctccagtctgcttcccacacacctgccctgcctcccaccttgggctgcgccttcaatgattccaggaaggtccaggagctggatgttggcacctttgtactaggatgcagaagagaagaaaggtaaggcaaggctgggcctccactggaaaggtcctgtctggatctgggacatctggaatggccccggggctcaggggctgagggaaacccagatgccaacctgtggccaagtctgagccttgtcaccaccccagcccagtgcagaccacagcctatgagctgagtagccgcctagggagggctcaagatcttccaatcccacaacactcatcactgatgataccagcactttacaaataaattgtttcaccatgggaacttaaggccataccactcagctgcccaaagcaaacacagcccaaggcagtgaagcttcatggggaggcagaaggatccagccaagcagcaattagtgaccagagctgtggtggtgttggggaggagagcacagggggcgccaggcaaagtagccacatgctggcctgacctcctagttccaggccccaccaggcatctctggggtccagcagctaggatccccagaagtgtcagtgctggagggcaaagcagctcagtccagagcctgtcctgacatggggacatccacccagactcacacacagggtgggcacaggcacaagtccaaacacaagcatgcgccccttctccttctgggcccagcacacccacttacttcaatgaccccaggaatacacgtcagagtggtgaactcataggacgctgcctcgctggccgtggaggtcatcagactcaagaatgtggactaggagaaaaggagatcattgcactgaggagccttgtccctggccttctgggagaggccccaggggctgggggcctgcaggtgcaggcagcaggaggagaccctctcaccctcggcttggtgacctaggtggctgtgaagagacctcccagccagagggctcacctctggccctgtcctggatgggtcagacaccagaggcccatctgttccttggaggcctcaggactgtctcaggtagaggcagggatctggattctgatggggttccccatatacatcaggagcctctcctaaccccacacaatcctccaggccctcttggccccagagaactttaagcaggtggcagtcccacggcactcgtggaaccagtacccagacatgctgtgcacccagggagggtgtaaggaggtgtgcaaggagatgtcaacctcctgggctgaggcagagacagctgacaggagaggtgtcgcagggagggagtggggaactgggaagatgtggatgtgaccactcagaccaccgttcactgtggctgggagttggagaaacctggctttgaatcctgcctctgccggggtgtcctgggattgggcaggaaactccatactctcagttcagggtctttacatgtagaatgggcatgaacccggtccctacctcacaggactgcacagggattaaaaagataaggcccgggatgtgcctcactccaaacactgtaacatcagtgatagatgctgtggctgaggccagccaagcagtgggcagacccagggagggaagaaacccagccccatgcctcctgccccatcctaatcagcagggccccaggaacgagaagcctgagactctgagttgcagggccagctatccagaccctgcctcctggctgactggcaggaagactgggggcaccctccccaaggcacccttagacctctcaagtccagaatgtggcatgtgatggaaatacatcgagttcccaaatccagaaaccctcagccttggggatctcctggaaactcaagaaatgagaaaaacctggtggagtggacaggtatagggatagacacggtggccccaagagcaatggctgttgagacagccagcaaccaacctcggggccactccctgattctgtctggcccctgtaagacctgggccctcccacggtgggagagcctatactcccaataaggcaggtgggatctgccatgggcccagacttcaagggtcacggctcttggtaactagagcggcttctctatcaatctctctctctctgatacatataccaatcatataggcagacagtacaacaaataaaactaaacactgcccagcctgcagcaagcactcaagaaaaggtagctgttaaccaccatcccctgtgcctggcccagagcaatggaaactgggtgtgggctcaaattgttcagctgaactgagttagaagctgctccccagcacctgtccagagctttggttgttgctcacttggcctatattctagcaacctctccactgtcccacttcactttgccctgctataacctgctatctacacaacagccagagtgattctgtaaaaaagtaagtcagcgcccagatggtagtttctaatgctattctccaatcaaaggaaccagggctccttagagaaatggcagattctaggccagggcagggaatatacaaaatgagcctgaggcatcttgcagtgtcagaaagtgaggaagtgctggaaaaacacaatggtggaagtacatcaaagaagccaactaaaatagctccaaagctaaaaagatttgagcagcaaaagaacatggtatgggtttagaccccaaagcacaaaataaccccccacgaatccatacggatatcaataaatgattgaataaaacaaatgaatgggagaagagagacaaatctcccatgcagaagaattccaaacagtttctgtagatgctcccctcaaggaggcgatggaattggactgcacacagtcacctccctccccaaagcggcatggcaaggggagaagagagcgtctccacggtggagaaacctgacacacctcagccaggtggtcaagatcaacatcagcaggggtaagtcatgttgacagtatgtggccttcatgcgatgtgataaaaatggcactttacctctgtggccttccttgctaactataaccccagattaaccacgagaaaaacattggacacaccccaactgaaggactttctacaaaatatgggaatggtactccttaaaaccgtcaaggttatcaaatcaaggcaagtctaaggaactgtctagaagagcctaaggagacataacaactgaactgtgatgtgggatctcaggacagaaaaaggacagtggggaggagctaaggaaatctgcataaagccagacttgaggcaagaacagatcaatattcattggtgtaaaatgttaactgccagggaaaatgggtgtggggtatatgggaactctgtattacctttgcaatttttctgtaaatctaagactattctaaaataaaaagtttactttaggccgggcgcggtggctcacgcctgtaatcccagcactttgggaggccaagggcgggtggatcacctgaggtcaggagttcaaaaccagccttgccaacatggtgaaaccctgtctctactaaaaaaggatacaaaaaattagccgggcggggtggtgcatgcctgtaatcccagctacttgggagactgaggcaggagaattgcttgaacctgggaggcggaggttgtagtgagctgagatcgtgccattgtactccagcttgggcaacaagagtgaaactatacctccaaaaaaaaaaaaaaaaaaaaaaagagccgatcagacatctcttttctgctcaaaaccctgcaatgatgtttattttattcctcacataaaagtaaatcacgccgggaacggtggctcatacctgtaatcccagcactttgggaggccaaggtgggcggatcacctgaggtcagaagttcgagaccagcctggcgaacgtggtgaaaccccacctctactaaaaatgcaaaaattagccaggggtggtggcggatgcctgtaatcccagctactcgggaggctgattgataactgcttgaacccaggagacagaggttgcagtgagccgagcaagactccatctcaaaaaaaaaagtaaaccaatatagattatacgctaaacagagcaacttccagaagaaaccttctttttttttttttttttttttttttttttgagatggagttttgctcttgttgcccaggctagagtgcaatggtgcaatctcggctcaccgcaacctctgcttcccaggttcaagcgattctcctgcctcagcctcccgagtaactgagattacaggcatgcgccaccacccctggctaattttgtatttttagtagagacagggtttctccatgttggtcaggctggtcttgaactcccaacctcaggtgatccacccaccttggcctcccaaagtgctgggtttacaggtgtgagccaccgcgcccggccgaagaaaccttctaaaaactctgcagtttcattcttcaatccaagccagggtcctttcggccgcccatatgccgctatcctctctgtcttctgccctccttgtgctcctcagagagccacctgggcctccctggacacaccaagcgagcacctgcctaagggcctgtgctcactgttccctctgtctggaaggttctcacccaggactctgcaagctcactcacttccttcaggcccctgcccaaatactcactcaccagagaaacctgccgggacctgtcgtaactagcagaccttcaccctgtcactcaccagcccccactcctcaccactggatgcaccttattacttatttactgtcctttctcttcaagaatgggagatctatgtgggcagggacagagctctgtctcattcatgctatgtctctagtccctggcacagtgcccagcacatgacaccgctagagatacacactcgagaagtatttgtgtgtgatgactgagtcggaagaccaagtagggctccatctgctggcaagaggaaagagcgtcctccatgttaggatgataaagggctgggatctgaccctgggggaggccaggtcttctgtgtccctggagctaagcagaaaggcagcgaggggagcctggatggtcacctgtttgaaagatgacttcttgctttcctccccgaggcccacactgaccatcactgaccttacccacagagggaaatccaatcagcgccacacgggcatcacccgacttcatgacatcaaagccctctcctttggacgaggccgatttggacggttccaggagctgggcccgatacttggcgagcttagctttcagcaggcccagatgatactcagtggctaaaggatggaaagcaagacagaagatgagtggccagggtgtccaagcccaggggtcaggcagggcccacatgtcgccaagtgctggctgggaagcaactgctgtcaaggagatcaggagaaaaaaaaaaaatctctctgcttaaaaggcccccttggcttctcacttcatttaagataaaatccagtctcttagaccgggcgcagtggctgacgcctgtaatcccagcactttgggaggccgaggcgggtggatcacctgaggtcaggagttcgagaccagcctgaccaacatggagaaaccctgtctctactaaaaatacaaaattagctgggcatggtcgttcatgcctgtaatcccaactatttgggaggctgaggcagaagaatcacttgacccaggaggcagaggttgtggtgagccgagatcacgtcattgcactccagcttgggcaacaacagtgaaactccatctcaaaaaaaaaaaaaaaaatcccgcctctttgttgagacttcaccaaatggttctcaccaatggttctcaacagagggggcaccgcttcctggggggcattctggaaattctgggagatgttttctgttcactttgatggtgaagtacgcattggcatctattgggcagggggcagggaaaccagctgccctattaggtgagtcagtcctatgtagctgaggagaattatcccaagtccatgacttgtcacatcccaaaggcatccacagagggaaaacctgggttaggatcgccaggcctagaacctagctctgtttacatataaacacaggacattttgtacagtgttaatatacactgaaattcccaggaatgcaactattatgtatatgaagggaagactatgtcatgctttgtctgaaactttacctagagctgctcaccattctgggatcccacgctgccatggcagcccctcttggggtgtaactcagtggccaatacaacacacctgcatcgtggctgtcacatccccagtgattctacctagaggcatgagcattctactgcttcagggtaacttcgttagatcctggcagcactccagcatttatgtatttaaataaataccattttcattataaattactttcctttttcttcttctcctttatattactattagggtattatattggtttttttcaaattcaagttatattactgatggggaatttcatttcaggactgtaaatggtgttacaaactctttgctctaaaaggaggccgtcgttgagactgagaaccaggaccctatgttacctggctcctggctacttcaacacactctgctacattccagacacagttgctttctcctctttttttaaagagatgggggtctcattctgtcactcagactagagttcagtggcacgattatagctcactagtcttgaactcctgcctcagcctcctgaataactaggactacaggcatataccaccaggactgcctaattaaaaaaattgtttttgtagagatgagatgttgctatgttacccaggctggtcttgaactcctggctgtaagcaatcctcctgcctcagcctctcaaagtgctgggattacaggttgagccactgggcctggcctttctttttttccttttctagaatatgctgacatcattccttccttgggaccttcacactggcgattctctccatttcaacgagatcttcctggaactggctccttaccatcatttgaggtgcagctcaaatgtcacttcttcaaagaggcctcccctgcccagtctcagagggcagtgagagcttgtgtcagaactccaccctgccattagtggggccattttactttggaaaagttagtcttcttgtgcatcagtttcttaatctgcaaatagggttattaacagtagtaacttcttaggcagatttctttttttttctttttgagatggagtctcactgtatcgcccaggctggagtgctgtggtgtgatctcagctcattgcaacctctgccaccagggttcaagagattctcctacctcagcctcccaagtagctgggactacaggcacacgccaccatgcccagctaattttttgtatttttaatggagatggggtttctccatgttggtcagtctggtctcgaactctcgacgtcaggtgatccgcccgccttggcctcccaaaatgctggaattacaggtgtgagccaccaacaaagtctcactggtgtcaccccggttggagtgcagtggtgcgatctcagctcactacaacctccacctcctgggttcaagagattctcctgcctccgcctcccgagtagctgggactacaggctggtgccaccatgcctggctaatttttgtatttttagtagagacggggtttcaccgtgtcgcccaggttggtctcaaactcctgacctcaagtgatccacccacctcggcctcccaaagtgctgggattacaggcgtgagccactgtgcctgaccatacttcagcagatttttgatggtggaataatggagaagtcttacagaaagcactaagaacatcgcttagcatacagtaagcacccaataaaagttggctataatctacagtaaattccgcccttccccagactgcttcctgcctcatgagcaggtttactgtcttctcgactctgaaaatgatcttatttctttacttccctgactccgataggtcaggaaatgggactggatccccagcctccagcacagggcccaggcacacaggaaatattttaccaagtgaatcagtgaattgatagcagtaagaaatggtcaagaatgggttctgcagctgggcatggtggctcatgcctgtaatcccagcactttggggaagctgagaagggaggactgcttgaggctgggagttcaagactaccctgggcaacatagtgagaccgtgcctctacaaaaaacataaaaattggccgggtggggtggctcacacctgtaatcccaacactttggggaagctgagaagggaggactgcttgaggctgggagttcaagactaccctgggcaacatagtgagaccgtgcctctacaaaaaacataaaaattggccgggtggggtggctcacgcctgtaatcccagcactttgggaagccgaggtgggcggatcaactgaggtccggagtccgaaaccagcctgaccaacatggagaaaccttgtctctactaaagacacaaaattagctgggcgttgtggcacacacctgggagactgaggcaggagaatcccttgaacctgggaggcggaggttgcggtgagccgagattgcaccattgcactccagcctgggcaacaagagtgaaactccatctcaaaaaaaaaaaaaaaaaaaaaaaaaaatatatatatatatatatatatatatatatatatatataaattagcccggtgtggtggtgcacacctgtagtcccagctactcaagaggtggaggtggaaggattgctcgaatgcaggagtttgaagttacagtgagctatgatcacaccactgcactccagcactccagcctgggcaacagagcaagactgtctcaaaaaaaaaaaaaaaaaaaaaaaaggattcagtgtcagtcaggtacacatggcccttcctgtcatcccagctcctaaaattctgagcatctctgaagggagggactaggtcttaatcacctttatatctcctttgtctactactgccaaagtggcagcatctctagcctccctgtgactttccttgggtcttatgggtaatatggaatattacagcagccagagggaactttcaagacagaagtcagaatagcccctcccctgcttaacaccctgcaccagctcccactgccttagaacacaacccagagtctttcccatgacctatggctctgcatgatcaaccccctcctgtcccatcactgcaccccagccccagtcctgttgacctgtaaacagccaagtttgttcctgcctcagggcctttgcactagctgctctttctgccaggaaccctcttcccccagatgtttgcgtgaccggttccttcttttcaatcaggtcttagttcaaatgccccatcctcatggtggtcttctctatcactccacctaagcagacccaatccccagtccctccccacccccaatattctgctgtatcaccctggtttgtcttcatagcacatattgctggctgacattatcttatttatttgatttctagttttcagaccgtcaactagaagatcagatccaagggctgggatatgcctgctgtgttcactgctttaaccacagtgcctagcacatagtaaaggctcaggaaagatcggccaggcacggtggctcatgcctgtaatcccagcactttgggaggccgaggcgggtggatcacctgaggtcaggagtttgagaccagcctggacgacatggcaaaaccccctctctactaaaaaaatacaaaaattagccgggtgtggtggcacgtgcctgtaatcccagctatttggaggctgaggcaggagaatcgcttgaacctgggaggcagaggttgcagtgagcccagatggcaccactgcactctagcctgggtgacagaacaagactgtctcaaacaaacaaacaaaaaagatttacagaaggaatgagtcatagagggccctcaactccttggccttcaaacctaaatggaaccaagggagggcagacactgggaccagctatctagtgttgcttgcttcctgctcccacaagcctgaatggctagccactagcctggccaattgcatctcccattactcttccataacccccttctgatctagattgttctcactgtcccatgaacataccatgctcactcccatgtctttgtctcagcagtggcccccacctgggatacccttccaacaaccagctcaagtcccactttgtcctggtgtcatcgttctctcctcacctctcttctgtgagctcctccagcccttacattctaaagtccagatttgaggcttcattatgtattatctatgttggggtgtttactttaaatactgagtgctcaccatgtgcccagtgctttgtaaaggccatctaatttaactcagctgtgtactaagatggagcaggggagtattaccccatttacagatgaggacactgagactccaagaaatgaagtgactttccaatgttttacagaaggtacgtggtggacctggggctcaaacccaggccttccagactccagagtcctgattcccttgctccaatgggctctcagctgctgggtgaggctgttcctgagaggtctcctcttgcacttcccaaaacaacagagtagacccaggccccaggcccagccatcaggagactgaggtttgaaccccagctccgcctctctctgggtcagatgcttgctctgtgagctgggactactctactcgggcacacggtctgggactgaccagatctcttggggtacgtttgcagtcagacctgggcgtgagacccgctcccgcctggccctgccttgggcgcgcagggcggcctcggcacttgtctggcaacttctccgcggcctcggatcttgccccagcattactgctggagttgttcccccattttacagacaggaaaactgaggcaggcagaaaggaaggccccgcccggccggccctcacccttgttcttctgtgtccgagcgatctccttctcgatctccgagatcttctctaagatccccatggtagcagcagaggtgggcgcacagacagcggtggcggcggcaccggcaattccggtctgacggcggcgacagagtagcgtgcgcccggaagccaaagagaacagcgttctcgtgggcgcctggtgctccaggattcagagtccgggcgagccaagtgccagacactatcggttccgcccgctgggccggccaggctgcggacctctggaaagagccggggcggggccgggccatgctgtactggcccacggctgcggctggcaggagcaagcaaggaagagagggaatctgcccgtgttgaactctgaactgcgggtccctgagcgcagctgactggcagtgtaaggaaaaggggctgagccgaaagcctagtggctttcattttatactataaatggaggtgtccaatcttttggcttctctgggccacattggaagaattgtcttgggccacacgtaaaatacaccaacactaacgatagctgatgagcttaaaaaaaaatcgccaaaaaaaccctcaatgttttggccgggcgcggtggctcacgcctgtaatcccagcactttggaaggccgagacgggcggatcacctgaggttgggagttcgagaccagcctgaccaacatggagaaacccatgtctactaaaaatacaaaattagccgggcgtggtggcgcgcgcctataatcccagctactgggaaggctgaggcaggagaattgcttgaacccgggaggcggaggttgcggtgagtggagattgcgcgccattgcactccagcctgggcaacaagagcgaaactccatctcaaaaaacaaacaaacaaaaaacctcagtttttttttctttgttttagttttgtttttttgagacggagtctcactttgtcatccaggctgtagttcagtggtgtgatcttggctcaccgcaacctccgactcctgggttcaagtgattctcctgcctcagcctcccaagtagttgggattacaggcgcgtgccaccacactcggctaatttttgtatttttagtagagacgaggtttcaccatgttggccaggctggtcacgaactcctgacctcaagtgatctgcctgcctcagcctcacaaagtgctgggattacaggcgtgagccgctgtgccctgcctaaatttcataatgttttaagaaagtttacgaatttgtgtttggccacattcaaagtggtcctgggccacatgtggctgcagacctcaggtgggacaagcttgaagaggttcaaaatggatccccaagatgctgccactgcactccagcatgggcaacagagcgagaacctgtctcaagaaaaaaaaagtggatccccataccacctttttttttttttttttttttttgagacagggtctcacttgatcacccaggctggtgtgcagtggcgtgatcacagctcactgcagcctcgacctcccaggctcaggtgatcctccctcctcagtctgggagaaaatcagccaccgcgcctggctgatttttgtattatgttgtagagatggagtttcaccattgttgcccagtctggtcttgaacttctgagctcaaggaatctgccagccttggcctcccagagttctgagattacaggcatgagccactgcacctgccccccataccaccttaacgcagtactccaactcaggatcacctaccatcagatgcctcctgatacgaagcagtgtaaagtagacagcatctcgtgacattttttcttagacaggctctccctctattgcctaggctagagtgcagtggcgtgactacagctcactgcaacctcaaccttccaggctcaagtgatcctcccacctcagcctcctgagtaattgtgactataggcccgaaccatcatgcctggctaattaaaaaaaatttttttttgtagagatggggtttcactatgttgcccaggctgctcctgaactcctggtctcaagcagtcctcccacctcggcctcccaaggtgctaggattacaggcatgagccacctcatctggctgacagcatctcttatgtagaattcttgccaaaaatactgtaactgagtttaggcatgaggaaacatcagataaatgtagaaagtggaacattttataaggcaattggccttggttcatcaaaattgtcaatgacagtggccagggggtaagtagggagattgttctaaatgaaaaaatgttacgtgtgtggaacttgtccagattctggttgaaatttttattttatttaaatttatatatttttttctttttttttttttttgagacggagtctctctctgttgcccaggctggagtgcagtggcgcgatcttggctcactgcaagctccatctcccgggttcacgccattctcctgcctcagcctcccgagtagctgggactacaggcgcccgccaccacacccggctaattttttgtatttttagtagagacggggtttcaccgtgctagccaggatggtgtcgatctcctgacctcgtgatccgtccgccttggcctcccaaagtgctgggattacaggcgtgagccaccgcgcctggctatctttttttctttttttgagacgcagtctcactccgtcgcccaggctggagtgcagtggcacaatctcggctcactgcaaacctccgcctcccgggttcgagcgattctcctgcctcagcctcctgagttgctgggactacaggcgcctgccaccatgcccggctaattttttgtatttttagtagagatggggtttcaccatgttagccaggatggtctcaatctcctgacctcgtgatccgcccgcctcggcctcccaaagtgctgggattacaggctatttttctttttttagagatggggtgtctctctatcacccaggctggagtgtagtgttatgatcatggctgactgcagccttgaactcctgggctcaagtgatcctccagcctcaacctcccaagtagctaggactacaggcacatgctaccatggccagttaattctggttgaaaaatttaaaagcacctataaaaagacattctgggccaggcgcagaggctcacacctgtaatcctatcattttgggaggcccaggtgggtggatcacctgaggtcaggagttcaagaccagcctggccaatatggcgaaaccccatctctattaaaagtacaaaattagaggccgggtgcagtggctcacgcctgtaatcccagcactttgggaggccaaggcgggtggatcacgaggtcaggagatcgagaccatcctggctaacacggtgaaaccccatctctaccaaaaatacaaaaaattagctgggcgtggtggcgcacgcctgtagtcccagctacttggggggctgaggcaggagaatcgcttgaacccgggaggcagaggttgcaatgagccaagattgtgccactgcattccagcctgtgcaataagagagaaactccatctcaaaaaaaaaaaaaaaaaaagacattccaagctgggtgtggtggtgtgtacctgtagtcctgattactgagaaggctgaggcaagaggatcacgtgagcccagaaggtaaaggctgcagtgagccataatcacaccactgcacaccagcctgggccatagagtgagatgctgtctctaaaataaattaaataaataaacaaaaattttgaataaatagaaaacattctgaggacaatttggaagaaatctaactacgaattggatattgaatattctggagcttaccaattttcttggtgtgatgatgtaagcgaatgtctttattcttagcagatgtacatgcagtatttaggggttgtcttagtcggctcaggctgccatagaataccatggacttgggccaggcgcggtggctcacgcctttaatcccagcactttgggaggctgaggcgggcagatcacgaggtcaggagatcgacaccatcctggctaacacggtgaaaccctgtctctactaaaaaatacaaaaaaagaaaaaaatagccaggcgtggtggcaggcgcctgtagtcccagctactcaggaggttgaggcaggagaatggtgtgaacctgggaagcggagcttgcagtgagccgagatcgagccactgcactccagcctgtgtgacataccatggacttagtggcataaacaacagacatttattttctcacattctggatgctggaagtctgagatcaggatgccaacatagttgcactccggtgagggctctcttcctgttttgcagagggctactttgccactgtgtcctcaaatgccctttccttagtgcatgctctcagagagacaagctctctggtgtcccttcttacaagggcaccatgtccatcataagcagtatcttaccccatgaactcatccaactctaattacccccataggccccaactccaaataccatcacatcacaaacattcagtccatagtaggtgtgacatctgtaccttactcaactagttcaaagtatgtatatatggggctggggacggtggctcacgcctgtaatctcagcactttgggaggctgaggcgggtggatcacctgagatcaggagttcaagaccagcctggccaacatggagaaaccccgtctctactaaaaatacaaaaattagccaggcatggtggctcatgcctgtaatcccagctactccagaggctgagacaggagaatcgcttgaaactgggaggcaggggttgcagtgagccgagattgcgccactgcactccagcctgggcaacagagagaggctctgtctcaaaaaaaaaaaaaaccaaagtagggctgctgcggtggctcacatctgtaatcccagcactttgggtggctgaggcgagcggatcacttgaggtcaggagttcaagaccagcctggccaacatggtgagaccccgtctctactaaaaatatgaaaattagccggttgtggtggtgggcacctgtaatcccagctactcgggaggctgaggcacaagaattgcttgaacctgggaggtggaggttgcagtgagccgagattgtgccaccacactccagcctgggagacagagcaagactctgtatcaaaaacaaaacaaaacaacaaacaaacaaacaaacaaacaaagaatgtatatatttagagatagcagggtaaagtaaatgtgccaatatgttaacaattgttgaaactggggggagggtatgtgggtgtttattaaatcattcttccaacttttctgtatgttattaataaaaagttggggggaggaaacatgtccttgaaaatcataccgcctgtgttcacattccaggttcctaactgtatgagattggctaaatttctttctttcttttttttaaatgagaaagagtcttgctctgttgcccaggctggaatgcagtggagcaatctcggctcactgcaagctccgcctcctgggttcacgccattctcctgcctcagcctcccgagtagctgggactacaggcgcccaccaccatgcccagctaattttttgtattattttttttagtaggaacggggtttcaccgtgttagccaggatggtcttgatctcctgacctcgtgatccgcccacctcagcctcccaaagtgctgggattacaggcgtgagccaccgtgcctggcctagcttggctaaatgtcttaacctctctgagcctgtttctacatcctaaaagtgggaataatgtggttgttataaaaatgaagtaagaggccaggtgtggtggctcactcctgtaatcccagcactttgggaggccaagatgggtggatcacctgaggtcaggagttagagaccaacttgaccaacatggcaaaaccccgtctctactaaaagtacaaaaattagccgggcgtggtggcaggcgcctgtgatcccagccactcaggaggctgaggtaggagaagcttgaacccgggaggcgggggttgcagtgagctgagattgcgccactgcactctaggctgggtcacaagagcgagactctgtctcagaaaaaaaaaaaaaaagaagaagataatggctgtagagcacctggcatgtagtttgcttgctgataagttgttgttgaatgccagaaccattggaaattgtttcttctctctggatgtcatggaatttctcagatttaacccctatttatcaagcatctactatgcaccaggctctgggctagacaggagcttttgcaaactttgagcttaccactctcatctgcattttacaaagtgaagtcttgagctatgcaaagtgcctggcccagtgctcaagccattcaatggcaggactgagatgataatccagggctttcaattccaagtcctgtgactccaaagtaacatggtaggctgtaggtggaaataaatgtatgatgtttctgtaaggtttaaagaagattatagtggtgagaacaacttgggtggcccatgaagatgtggaggcctgaagaaccctgacccaggttgggggcctgtaagtcctctctctgcctccaccttctacatcagtggctctcggagcctccttcaccaccacctttgtgcccacaaaggcaggttcacttccagtttttagttggggaaacagaagagttttggaaaatgactcaccttctgagaatcctggcatctttgctgttgtatctgcttccatgaaatccctgtgggcctcagttcttctcaggtaacgttagaatcatgcctacttcaagggtcaagggagatgaccgcacatcagacttgctctaggcaaccggctctcctgcttggaaggtctgggccctccaaaccctaacccggaaggccacctacaagcctttgtgtgcatgctgtgcaatgagcccttgaggtggagtttaaatgcttctggagaggctgctaccggaaccgtagaaacatttggcttgtgcatcaaaagacactatcagcctggcacggtggctcatgcctgtaatcccagcactttgggaggctgaggtggacggatcacctgaggtcaggagtttgagaccagcctggccaacatggtgaaaccccgtctctactaaaaatacaaaaaaaaaagagctgggcgtggtggtgcatgcctgtagtctcagctacttgggaggctgaggcaggagaatcacttgaacccgagaggtggaggttgcagtgagccaagattgcatcactgcactccagcctgggcaacagaacgagactgtctcaaaaaaaaaaaaaaaaaaaaaaaaaaagacactatcaacacagtgaaaaggcaacccacagagtgggagaaaatatttgcaaatcacatatctgaaaacaacccaattaaaaaatgggcaaagggcttgaattgaaatttctctaaggaaaatatacctggggagtgagtgtttaatgggtgcagagtttcagtttgggaagatgaaaaagttctggagacaaagggtggtgattgttgtgcaacaatgcgaatgtacttaataccactgaactatatccttaaaagtgggtataatggcccgggcacagtggctcatgcctataatcccagcactttgggaggctgaggtgggcggatcacctgaggtcgggagtttgagaccagcctgaccaacatggagaaaccccatctctactaaaaatacaaaattagctggacacggtggcacatgcctgtaatcccagctactcaggaggctgaggcaggagaatcccttgaacccgggaagcagaggttatggtgagctgagattgcgccattgcactccagcctgggcaaaatttcgtctcaaaaaaaaaaaaaggttaaaatggtaaatttcatgtatatttatatctattttaccacaacaaaagtaaataaataagtaaagcatttcagaagaaattctggcaaagtaactaggggcaaatctggacttcacttataatcacagttatctaaccgggacagtattccttgttcaaatttgttcatttatttaacagtactgactccatgttagagaaaagtttgtttgcctgatataattatgctttgtttgagtttgtagatttttcattaaaaacagcctcaggaaaacaggaccttcgatagacataaaagaaaatacgctgaccaacaactctaggaacaggctgaccagcctgataagaacagcttgatggtgcctgcagatggccacaagacattgaccaaggaattaacacttaactgccagcctgagactgcgcgtttcataagaatgccttgatcatcatttgtactcccctaatttcccttaaaactcttcatccagagatagaacttggagaggtagtcttcaaacaagttcactgcctccctccccaaggtttcaccaaagcttgtctcttgacttttgtttgtttcttttcctttttttcttttcttttcttttttttctttcttttgagacagcatctcacatagtcccccaagctggagtgcagtggtgcgatcttggctcactgcaacatccacctctccagctcaagggatccttccacctcagcctcccgagtagctgggacccaatactggtgcacagtagtgtgcaccaatctgctcaaatcgaattggctaatggaactgtttggctgctcagctggtgtcaggtgagcacaactcgtgtgtcctctggatagagaaatgaatgggacagcagccctgccctcaggaagctcagagcttggctggagagctagataagtgaacaaaaagacaggaagtcagcaaaagatagaatgagtatgtgagaatcatcacattattattattattacttatttggagcttgggtcttgctatgttggccaggctagcctcaaactcctgggctcaagggatcctcctaattcagcctccagagtagctgggactgcaagcacaagcccaagccactgtgccaggctcttttttttttggagacagagtttcgctctgttgcccagtctggagtgcagtgttgcgatctccgctcactgcaacctccacctcccgggttcaagcaattctcctgcctcagcctccaagtagctaggattacaggcatgcgccaccatgcctggctaatttttgtatttttagtagagaggggtttcaccatgttggccaggctgctctcgaactcctgacctcaagcagtctacctgcctcagcctcccaaagtgctggaattataggtgtgagccactgtgccattgacaccccttttccccaagcctggacattcaccaaaggtacaggctaccatgttgggacaggctgtgggggagcatgttgcacctgtgatgaaaacattcatttttgctggacacagtggctgatactgtaatcccagcactttgggaggcccaggcgggtggatcacttgaggtcaggagttggagaccagcctgaccaacatggtgaaaccccatctctactaaaaatacaaaattagccgggcatggtggtgcacgcctgtgaccccagctacttgggaagctgagacaagaaaattgcttgaacccaggaggtggcggttgcagtgagccgagattgcgccattgcacttcagcctgggcaacaaggagcaaaactccgtcttaaaaaaaaaaaagaaaagaaaaagaagaaagaagatatttatttttacccagcatggggtgttctctgaaggttgactctgacccaggaaaaagagctttttggagacagggtctcgctctgtcacccagactggagtgcagtggcacgatctgcagcctcgacctcctgggctcaagtaatactcctacctcagccacctgagtagctgggaatacaggtatgcaccaccacacttggctaatttttgtatttttagtagagactgggttttgtttgtttgttttgtttgttttttgagatggagtctcactctgtcacccaggctggagtgcagtggcgcgatctcggctcactgcaacctctgcctcctgggttcaagcgattctcctgcctcaccctcccaagtagctgggactacaggcacgtgccaccacgcccaaataattgttttttattttttttatttttagtagagatggggtttcaccgtgttagccaggatggtcttgatctcctgaccttgtgatccacctgcctcagtctcccaaagtgctaggattacaggcgtgagccacagcacccagttgtttatttgttttaaatagagacagggtctcactacattgcccatgctggtctcaaactcctgggctcaagttatcctcctgcctcggcctcccaaagtgctaggatttgtatattttttttcttttttctttttttagagagtcttgctctgtcgcccaggctggagtgcagtggcgcaatctcaggtcactgcaacctccgcctcctgggttcaagcgattctcctgcctcagcctcctgagtagctgggattacaggcgtgcgccaccatgcccggctattgtgtatttctggtagagatggagttttatcatgttggccaggctggtcttgaattcctgacctcaagagatccacccgccttggcctctcaaagtgctgggattataggcttgagccacggcacctggtcctaaagtgctaggattataggcacgagctactgcacatggccgagaccgggttttgccatgtgacccaggatggaaaaaggagcattttaattctaattgatgcacactttattgaagctgcagtaacctcagacgtctggagttggggtagtgtgtagggctgtttgtccttttgaacctagtcgtgtcttctgtgatgagttaacatctgagggttttagagaaaacttctgggctgaaatccagaaaacaaagccagtagacctcctaaatgctgtcttcattcttacaggaagcttcaggccccagcccttatggaacacggttaggcagagacaattgcacgggggccctctctaggtgcattggagggatgattggcctcaggtggcagcagggaatggctctgtggtacacccagggtgaccaggccccagagttcctagtctttttgtttgtttgtttgttttggttttttgagacagagtcttgctctgtcccccaggctggagtgcagtgatctcagctcactgcaagctctgcctcctaggttcacttcattctcctccctcagcctgccgagtagctgggactacaggtgcccaccaccacacctggctaattttttgtatttttagtagagacggagtttcactgtgttagccacgatggtctcgatctcctgacctcgtgatccgcccaccttggcctcccaaagtgttgggattacaggcatgagccaccgcgcccggccaggagttcctagtcttgggaaatggcaaatattcttggcccccaagagtggtagaagttgccatttagatgggaaaggaaaggggtctgggcaaggggcccttgcatggtaactggagagactaaagatgagaaggatctctccagagcttcagcacctacagcctgagacactgacacgaggcccttttgtgaccaggtgaagggagagtcccaataagaaacactcaggtgtcattttctgcaaccttggcacgatgcaggctgttaatctgatttgagataaggaaaataaagttaatggagtaagattcctccccactaaagagatgagcagcatggggtccaggagcatgcatggtggaccctaatacagagtggatggtgcaggcagaaacatcaggaaaaatgttctggggaagatggttcccttagagagtaagtcaggccaaggtcaaaaagtgggaatgagcagggctggggggatttcctgtgggctctgcctgggggctctgcaggtctggcagcatctccagcaagccagatggatgctggacaggtcacagaggactggtcacacctgaggttctcctgaggggtctggatttgatcttgtgggcaataggaacacttttaaggtaaagagaggtctgaccaaatttgaatgtgaaagcttctccctttccaactttctatttttatttattattttgttgttgttgttgagacagggtctcactctgtcacccaggctggagtgcagtggtgtgatctcagctcactgcaacctccacctcctgggctcaagaggtcctcccgcctcagcctccctggtagctgtgactacaggcatgcaccaccatgcctcgctaatttttgtattttttgtagagatgggtttttgccatgttgcccaggctggtctccaacttctgggctcaagtgatcctcccaccttggcctctcaaagtgctagtattatagatgtgtgagccaccaagttcagccccaattttctagaattctgattccatccatcctttgagcccaccaagatctccaatccattggtgctaccaccttcatccccttgaagtcctctctccctccgtatccagcttgaattccatggtcttcacttacttcactcccttgcacacacaacaactccctgactcttcactcacctgtacttgcaaaaccacaggcctcttcctactctgcacctgcacctgggttgggaacatccccatgcttgcttggggcatgcttgacttccgcatccatccactcttcctctcctggacaaccatctcgtgccttctttctcctcaaaggcccaatacctctccccctatcctcatcctcaggagggttgtctaccttgctctcaagctcactaagaaccattgaagaaatgagacaagaacttccacaaacttccaacttgccagcattggcatggctgcttgttcccagaaacaaactctcagtgcttctacctgagccatccctgtcctacagcttgaactttgcattctgctgtgtcattttcaacagcatacaaatatgctgtcacacctcccttcggaaaagtaagcaaaactccttctcttgctggtctgaattttctagttttgtacaatgcatccctactgtttctgaattaatggatggtttttaaaaatatttttgattcaacttttttttaagcataatttacttgcaataaaacacaccattctccagtgcataattcaatgagttctgacaaatgcatagggcgatgcagccacccccacatttgacacacagaacatctctatcactccagaaaccaccacccccccgcactcagtcctcaccccaactcagccccaggctgccacccatctgctttctatcactaccagttagactcatcttttctacaacttcatctgaacggaatcacacagcatatcgtcttctgtgtctagattcctctgctcagcataatgtttccagattcatctgtgttgtatcgctatagtacatttctttttataagaaatgctgagaggtgtttcattatatagctgtactataatttataataaatggttacctagaaattcattaaaatttggcaatggttccttggatatgacaccaaaagtacaggcaacaaaatgaaaaaaaaaatagataaatgggattatatcaaaaagaaaaacttttgccaggcgcggtggctcacgcctgtaatcctaacactttgggaggctgaggtgggcggatcacgaggtcaggagatcgagaccgtcctggctaacacggtgaaaccccgtctctactaaaaatacaaaaaaaaaaaaaattacccaggagtggtggagggcgcctgtagtcccagctactgggaggctgaagcaggagaatggtgtgaacccaggaggcagagcttgcagtgagctgagatagcactgcactccagcctgggcgaccgagcgagactccgtctcaaaaaaaaaaaaaaaaaaaaaaaaaacttttgtgcatcattaaggcactatcaagagcatgaagaggccgccgggcacggtggctcgtgcctgtaatcccagcactttgggaggctgaggtgggcaaattgcgagatcaggagttcgagaccagcctggccaacatggtgaaaccccatctctactaaaaatacaaaaagtagctgggcgtagtggcaggcatctgtaatcccagctactcgggagggtgaagcaagagaatcacttgaacttgagaggcagaagttgcagtgagccaagatcgtgccactgcactccagcccgggcgacagagtgagactctgtctcaaaaaaaaaaaaaaaaaagagatggtaaagagaccccacagaataataggagaaaatatttgcaaagcatgtatctgataaggaattaatatctagaaaatatagagaacacctacaattcagcaacaatgaaacaatgcacctgatttaaaaatgagcagggggccgggtgcagtggctcacacctgtaatcccagcactttgggaggctgaggtgggcgaattgcgagatcaggagttcaagaccagcctggccaacatggtgaaaccccatctctactaaaaatacaaaaattagcttggcgttgtggtgggcacctgtaatcccagctactcaggaggctgaggcaggacaatcgcttgaacccaggaggtgcaggttgcagtgagttaagctcacaccactgtactccagcctgggcgacacaggaagactctgtctcaaaaaaaaaaaaaaaagaaagcagagatcctgggcaacgtagtgagaccctgtctctacaaaaaaaaaaaaaaaaaaaaaaaaaaaaaaaaagcaaaggacttgaatagacatttctccaaagaagatatacaaatgttgaataaacacttgagatgatttctcagcatcactaatcattaggtaaatgcaaatcaacatagtgagagccagtctctacaaatattttgaaaaaaaattagctgggtgtggtggcgtgcatctgtagtcgcagctacttgggaggctgaggaaggagaattgcttgagcccaggaggtcaaggccacagtgagtcatgattatggagtgcagaaatgccactgcacggccaggcgcagtggatcatgcctgtaatcctagcactttgggaggccgaggtgggcagatcacctgtggtcagaagttcaagaccagcctggccaacatcatgaaaccccatctctactaaaaatacaaaaattagccaggcatggtggcaggtgcctctaatcccagctactcaggaggctgaggcaggagaatcgcttgaacctgggaggcggaggttgcagtgagccaagatcgtgccattgcactccagcctgggcaacaagaggaaaactctgtctcaaaaaaaaagaaaaaagaaaagccactgcactccagtctaggtgacagaatgataccatctcagaaaaacaacaacaaaaatcacagtgacgtatcacttcacacccattaggatggccattataaaaattttaaggctgggcacagtggctcacgcctgtaatcccagcactttgggaggccgaggtgggcagaccacgaggtcaagagattcagaccaacctgaccaacatggtgaaaccccatctctactaaaaatacaaaaattagctgggcgtggtggcacgtgccttgtagtcccagctacttgggaggctgaggcaggagaatcacttgaacccgggaggtggaggttgcagtgagccgagattgtgccactgcactccagcctggcgacagagtgagactctgtctcaagaaaaaaaaaaaaaatttaaaaaggaaaacaggtgttggagaggatatggagaaaatggaatcattgtgtactgctggagagaatgtaaaatggtgcagccactatgagaaacagtttggtgttcctcaagaagttaagcatagaattatatgatctagcaattccactccttagttacaaactcaaaatacttgaaagcaggtactcaaacagatactgaccacacaaaccagtgttcataacagcacaatgcataatagtcaaaaggtagaaacagcccaaatgttcatcaacagatggataaaatgtgttatatacatacaatggagtatcagccatagcatagaaagaaattctgacacattctacaagtgaaaaaaaccagtcacacaaagataaatactattatgatttcatttctatgagggatctagacaaattcatggggacagaaaatagaatggtggttatcaggactagggggaggaatggggatttagatagcgtttactgagtccagaatttctttaggatgatggaaaacttctggaaacagtggtgataggaacacaatgtgaatgtacttaatactactgaactgtacacttatgagtggttaaagtggtaaattttatgtaatacacattttaccacaataaacaaagcctcattacatataatttgcagaaaacccctccccctgcagaaataaccaaaccaacaacccatttctagcccactcccctgacagctacttcctatttattttctttccttatgcagcacaactctgcaagctactcacatcaagctaaaataagcgagagagagactgacactccaaaacaaaaagtttatttgagaatagcaaggggttgcaatctggggtatatggttggggaaaggggaatgaatcttttagaggtaaaaaggagaagtccgtgtaagctgttttaagacagagaacattgttcacaggggcttctcacaggctccagttcccagctcccttgcagtgtggtgactgtgtgaatggccagaagccacacttagtccaccaacaccacaagcctgaaagcctttctctcatttcagggcgggaggctcacttagttacgctcaaagcttcctgtgcgttggagtcacccggggagctttaaaaacatcgacaggttgtgaggactggtctgcatgctgcctgacattaaatcagctcccatgtgcttctgaagtgcagccaggtttcagaaacactgctccaggtcaagccagtgagaaggcatgaagatggaggggctgtggagcgattatggagagaaaccatgactaatgcattgaaaaatgaagcgaactgaaaaatcagaaggaaaaaaatggcaaaaataaacttgaatccagcatatgtttctctacaaatgaaaagccttacatgttttccctgctatgtacaaatagggagtttcaatctttcgatgttttggaagaaaaatctggagggaaaagctgttcaactgcaatccaactttgaggcttttttttttaatttttatttttaaatatatcaaagcctactgcctatttcattactgagcaattttaatgcttcccttcccaggtgcagttcagatgagtggagatagcactttttttgttgttgttttttttgagatggagtctttgcactatcgcccaggctggagtgcagtggcgctatctcggctcactgcaagctccgcctcccgggttcacgccattctcctgcctcggtctcctgagtagctgggactacaggggcctgccaccacgcccagctaactttttgtatttttagtagagacggggtttcaccgtgttagccaggatgagtcttgatctcctgaccttgtgatccgcccaccttggcctcccaaagtgctggaattacaggcgtgagccaccgcgcccagccgacagcattcttatagttttccttttgtcctgttttgcaattggtttcacacttaaaatctacacaatttctactatttctacagttcctatagatggcctaaaaacaaagctaactaaaggttataaattggggatctaagaatcgagatatgaaagagagttgctatagctgttgtagacatgttttattcctgcatcaccctcaatacctacaatggtgcatgtggcaaggctcagtagatactttttatttatttatatttttttgagatggaatctcattctgccactcaggctggagtgcagtggcacgaccttggctcactgcaacctctgcctccctggttcaagtgattctcctgcctcagcttcctggtagctgggactacaggcacccgccaccatgcccggctagtttttgtatttttagtagaaatggggtttcaccatgttggctaggctggtctcgaactcctgacctcaagtgatcctcccacctcagcctcccaaagtgctgggattactggcatgagccaccgcaccctggcccagtagatatttttatattattattaagcaagaataactttttacatgttattcaatttacaattattcttattcaatttacaatgtgctttcaggagcatcttctagaatcctcaacaattctttagtccagacagaggttttccactttctgggtgagggaagttgggctcagggaggttagctgatgtaccttgagggcagattgggacccaaggttgataggtggaacccaggcctcccatgacttttccattcaacaaaacagccaataaatggtgtcttggctgggtgtggtggctcacacctgtaatcccagcactttgggaagctgaggtgggtggacagcttgagcccaggaggttaagaccagcctgggcaacatagggagaccccatctttacagaaataaaaaaaattaggtgggcgtggtcgcatgcctgtggtgccagctacttgggaggctgatgcaagaggatcacctgagcctgggagtctgcagtgagctgtgatagcaccactgcactccagcctggtgatagagagcttgcctcaaaagataaaaataaatggtgtcttaaatcctgagtccagcactgtgaacagtctattcttttattgacaccacatctcatgggagaaaaaagcttattattgcttagacaatatgagatcagaaaatacacacaacaggggagctttgccctgccactgatgtaaattcccttagcatttcaacttgcttaaaatttagacctcaacactttatatgtttcctcaaaatctcccatgtttccagtcatgttccttcaagcctcctagggaggtgggacctgaaacgtaacagaatggtttgtcagaataaactgtaatggctgatttagggatcctgctatttgggggtccaagtgcctgtgctttgagacttaggcatcttctctgaggaccacagtcacagtgtcgagagcagcccaacagcattgcctgtccccacaccagaacacaaagcaggctttggacagatacctctgcctgcacattttctctgtgttaaatagaaatataaacccttcacatatggaaaaaaaaaatgcttccacatttctgaagaaatacagaaattaacaaaatggagcttgaatagaagtgctgagcagctgaaaacattcagaatgaaaaaggagcaagcagaccactgcaacagttgcccagaggggccctcggtttgccctggcacacagaggtctccggctggccctggagagctccacagccacaggcccagagaggactgctttcctctaatggagctgctttggtttacaaataggacaaactcactgcttaaatacctttatttttttttttaaattatttggacattgatagctctgcaaaatacttctcccatcccaaaccctcaaactccttccacatgtcctccataaagaaacaaaatatttatactttgtgcccattcaagtctaatttttaaaaacatttaagattcaaaatcaaatattatttttctttcccacaacttgttagtaattttaaaccacgatacaacacagttaatggcatttctttttaaaaattagcttatcagactattttatgagaaaaaaatcaattcaaggccttagtgagaatattatattctctgtttctgaaagcaaaagacattgaaaaacccctttgctcctctggagtttgtgatttccacataaccaacaaaaccagcacacagattgacttcctacttaacagtaggtattgttttgttactttgggacagcagctgaaacactatctaaacttgaaaagggtgggtgggtggaagtccagcacagaagagggtcgaggctgaggacagcagaatggaagctttctgagcagtggagtaagaacagccaaacccctaggatcctacctcatggcaggcttgtttgggatggaagacagaacatctgcaatctgcactaatttcttaaggatggatacaagtgtcaaccaaaaatattgcacatagtttcagaggcatgtaaaccactgagaaggttcaggaaagcgtaactacggatgaagatgattccccaaagttccttcaggaacggagagaaagaagttgatgttggtaattcaggagttactaagaggaggtggaaaaatccttaatcctttccctatcctcagtgggcagacttttaaatgaacaaatcttctcatagatgtgtctgaaggatctagtaaaggtatcacctcttcattcttcccagtacaatgggtgcacttcatcacctgggtaaaaaaggaaggaaggaagaaatcctgccataggacttgggttgtttgtctagaacacagcagtgtttgcaaatggcccttcctgcccactcaaaccactactcggagccacagcatgagccgtggatgagctcagggatgacctccggactcagtgctccaaggggaggcctatatccctcacaggcctggaaaaatgcagaaggtatgggctcgcatgctgttgaggggagagctgaagagagtggaatggcacgtacggcaggaaggacagcacagccccatggcctccttcacttgtccatcagctcaaccaaggccatcagctcaacaagaccacagtgagcatctcctcacatgacagcagctgggcttgaccacagccagcccttctgatgccttgttgaatttcaggattgaggagactgttctgactcatctctgggaatgaattatttttccctttaagtcatcgggccaactttttagggttccaaagccctgaccttcctgaatgggtaggttgcccctctgtacacagtcctgggataacagattttagatatcacaagtgcccactggctactttcccaaatacctctaccttaaggcttcccctaacattcaatctcagtaacatacagtacatatgtcaataaaattaaagtcacttcttaagaacagaaaaggtttcccattgctcgtctcgtctcactgaagggcttcacattctcttatgctgcccgcccatggatatgcagcctccaggttgctttgctcctgggggttatgatgcaatcttgtttttaaagcttttcctcttgtattcggagtaagtcttgtaaaccaccagaaaaatgccaaatccccaaagccctagccatgtttgtgggctacaactgatgccaacctattaagcttttaaaacatttaaaaaaacaaaacatcatacacacacacacacacacacacacacacacacactttggcacgtgagcctcgagttatttgagcatgttcatgtttcccaccccttcccctgtcccaacatttcagagtcactgttttcagagaacgacgaccccttctgcctcatggaaggctgccgccaagcattgctgttttgagtagcaaaaggaggcggcacaaatgctaaactggccccaaaaacagttcttgtgttgagcactataatttaggcaatgctgcaaaacttttgtaccaggatgactagtttcaaaactgctggttgattaaatatacatatacatatagatatcgatataaaaattactaagtcaacatttgctgttttcaatgtgaaaacgataaaatgtaattctgaataattgtgcatttgccatagggtcctcgttaaagggaccataaaaataattttgtaataaaaaaactcttatttttaagtttagtattgccctcaagttgaaaagtttggagcaaatgtactgagtaagcaggactggaatctgttcctgccagggatctggaagccttaaatttagtgatccctgatggcaggcccagggaacctgacagctactcactagctttgcactgttaacagtacagggctcagcagcgcacgctgacccgtgacacaatcagcactgaagactgaggcagcccagcagggactggagcctccgcctcttgtgcccttggtggccgatgatgcggcagctggccaactccctgcacagagctctggggggcacagaggtgctggggctctgccttctcttgagctaccagacaaagcaactggcggggggtgggggtctagggcctcgggaccactgagcaccaaggctgagggtgatccgggagcagaccttctattcggctggaggtgggacggaggaaggaatgggcatttcagtgatgtagaagttagctgtgcaggaaggaaaagtgcgtttaaggtagcttaaaaacaggtgaagaccaaactgccactgaggggaggaagaacgaagactgctccctccacctgccccacgggccagccatgctccttggattctgtgggttaacattcatgctttgtgatgcgagtctgctcgtgaagaaacaggaacacacttctcctggttctggcaggtacacaattttctcggcaaagttcttttttgccaagttcagttttatttggttgctgttctgaaccgttgtcaccggaattcatagatgggtgcactgtgttcaggaacatgggttagattgagggactgatacctgcaagggggaggagacagaaacgggaggtagtcatctaatgcaccctgagcaaaggacattagtaacccctcaaaaagcagagcacccaacaagtcacatacttggactgaaatgcacattcattttctatttctcaagttgaacctagtttgatttcattcattctttctttttttggttaatcctcctgaaccatgcactagatgaatgttttttttcattctgctctaatcatgaagttaactatggtatgttttataaaaaggagacctcaataagctgtgggagaagatggagacccacgcccaagccctaacctcaccggctgctctgacctctcctgctgtagcatgtaatgccaggctctcatatcctaagaactttatggctagcataggcataaactgattctcatggtatctaaagagagcgtagaaaaattcatttcactactgccttaaactgtattttacctttcatttaaattttctcactttcctaggtacggtattaggcttggaaaacattagtgatatctgaggtgtttgcctcccctgttggcaggtgatccagggagtcatgcagagggaggagaaataggggcagacaatctacatgctgggatgacaacctcgggcacatttagagtcaatgtctagcaagttggctctcccctacttgtttcatacaggagtgtggaagaacgtaggaaaaagcggcttatttcttaccaaaaacaaattatcaggaaagaaatatgcattagccatcaaaaatatgcaaattagaactacaatgaaatactgcttcacatccactagggtagctataattatagagacatgataacaagtgccagggaggatgtggagaaactggaaccctcatacatgccggtaggaatgcaaaatggtgcagctgctgtgggaaacagtttggcagttcctcataaagttaaatatagcaataccgtatgacctagcaatttcactcctaggtatatgtccaaggaattgaaagcaggaactcagatatacccatgttcacagcagcattattcacaagagctaaacaatggaagcaatctaagtgtccactaaataatgaatggataaataaaatgtggtatataccggccgggcacggtggctcacacctataatcccagcactttgggaggccgaggcgggtggaacacctgaggtcaggagttcgagacaggcctggccaacatggcaaaaccccgtctctactaaaaatacaaaacttagccagacgtggtggcaggcgcctgtaatcctagctactcgggaggctgaggcaggagaattgcttgaacctgggaggcggaggttgcagtgagccgagatcgtgccactgaactccagcctgggggacaagagcgagactttgtttcaaaaaaaaagttgtatatacctgtaatggaaaattaattggcaataaaaaagaagttctgatacatggtacaacatgaatgaaccttcaaagcattatgctaagtgaaaaaagccagaagcaagggccgtattttgtagattccatttatataaaatacccagaataggcaaatctatacatacataagagaaagactagtggttgcccagggctcagaggggatgaggagtttgggataatggctaagggtatggggtttcctcttatggtgatgaaaatgttctaaacttgatagttagacaactctattaatataggaaagatcactgacttgtacactttttttttgagatgcagtctcactctgtcgcccaggctggagtgcagtggtgcaatctcggcccaccgcaacctccgcctccgaggttcaagtgattctcctgcctcagcctcctgagtagctggaactacaggtgcgtaccagcacgcctggctaatttttgtatttttaatagagacggggtttcaccatattggccaggctggtgtcgaactcctgacctcgtgatctgcccacctcggcctcccaaagtgctgggattacaggcgtgagctactgtgcccggaccaaagctgttatttatttatttatttatttatttatttatttatttatttatttttgagatggtgtctcgctctgtcgcccaggctggagtgcaatggcccgatctcagctccctgcaagctccacctcccaggttcacgccattctcctgcctcagactcccgagtagctgggactacaggtgcctgtcaccatgcctggctaattttttgttttttagtagagacggggtttcaccgtgttagccaggatggtctcgatctcctgacctcgtgatccacccgcctcggcctcccaaagtgctgggattacatgcgtgagccactgtgcccggccagctgttatttttaaaaaggattataaaagttttacaaacttgcgtgaaaaccattactgaaagcctaaaaatcgtggctacagggctggcatttacttgcagatataatttcgttaccactgaacaaggaatctagggtaggatcacttcacatataacaaagtgttaaatactggaaagaaagaatttttaccttcagagaggaaatcaggcattttatcacatggtttgccctccggggacagcaaggtgcttaaaaagcagcaaggaggcaggagaatccctcaaaaggtggcaaaagttagcattcaggcagagttcagtcctttactattggtgacacactggacaggactgtccactcacaggcccccaggtcatgagccttaaatcaagtgcatgtcggaccaactctaaggaatgcagccacaaaatttaaaaagctgctgacagcaaaattcacattgtccagtactggatcaattcacattttagttactaattcaatttgcaaggattaaataaaaaccagcaagattgagataaacattgccaaaaatacagtattgcttaaaagtgcttagaaatgagttctttcacctataattcattttcatctcatttactctgctctgtgcatagggataaggccttattgtgagcaactgagatcactgaaataagctctcagcatccaaataaagcacagaatctatacagagacaggctaagatgttgcttttgggtttgatgagccaagggagagccagctgggcagcaagccctccccgtggcctctgtcctcagaggtcctcaccattctgaactcctatggtagtagtagccctctatggaggctgctgacttctgaaagcagatgtagtagaacccggcaaaagaagcaccactgatgtctttgatcgtgtgatctgggaccagaaactgttcctgcacacagatgaagagggtcagtaacagatagcattctctgaccacccacggggcctccctgttaagcatcagggggttctaaggaccactcgagaaaaatataggatctcatagtctaacctagacttgctgggtgatggcgggcccgtggggtctcagcctgacttctaaaaagcgtccatgtgctcctggagtattctatatactaaagtgacaaactgtgtcttgagctcactaggatcagcaattcagagaaggtaccatggccgaaacatctaatatataaatcaatacctactcacctgcctgtctgcctgcctctctatctttcagagaccacagacaatcaacctgggaagagcgaagtttctgctccagttctcagaactgtcaacagatgcttgataacatctagaacagtgagtcgcttctgtaggtctgtggaccattctgagtgcaaagcagttgccagtagcccctgtgacaccccctccaagagcttgacgccttgtcaaaagcagtcagaacggtactgttctttaccagggaccttaggagagaggcaagcttgccacctctgctggagctgaaagctggaaacccaggtcctggcacctactttcccagagagatgaggtcagaagctccagggcctcaggtggtctactaaaggaccacagatgagccactctgagacattctttggaggcaaaacaagcccattgctttttaaacaaatttaagacaccctcccattccttattcaacttctaaaattgtggcttttaaaattaattttaaaattcagatcgggtgtggtggcttatgcctgcaatcccaacactttgggaggctgaggtgggtggatcacctgaggtcaggagtttgagaccagcctggccaatatggcgaaaacccgtctctactaaaaatacaaaaaattagcagggcatgttggcgggcacctgtaatcccagctacttgggaggctgaggcaggagaattgcttgaacacgggacggggaggttgcagagaaccgagatcgcgccattgcactccagcctgggcaacagagtgagactgtctcaaaaaacaaacaaacaaacaaaaaaacccaaaaattagccaggcgtggtggtacgcgcttgtagtcccagttactcaggaggcggaggcaggagacttgcttgaacctgggagacggaggttgcagtgagccaagactgtgccactgcactccagcctgggcaacagagtgagattccgtctcaaaacaaacaaaattcaaacaataaacttcctttaacaggttgtttagttgacatgtttcccgctagatggcaagctcgtgagcatactgttccctgtttactctctgcatctggcaacctactggaagagtggtgatccccacttctttttttttttttttttttttttggtgagacagagtcttgctctgtcacccagcctggagtgcagtagcgcaatcttggctcactgcaacctccacctcctgggttcaagtgattctcctgcctcagcctcccgagtagctgggattacaggcgtgcaccactacacctggctaatttttgtatttttagtaaagacggggtttcaccacattggccaggctggtctcgaactcctgacctcgtgatctggctctcttggcctcccaaagtgctgggattacaggcatgagccaccgcgcccagtgatccccatttcttttttttttttttttttttttgagatggagtcttgctctgtcgccaggctggagtgcagtggcgtgatctcagctcactgcaacttccatctcccaggttcaagtgattcccctgccttagcctcctgagtagctgcgactacaggggcatgccaacatgcccggctaattttttgtattttttagtagagatgggttttcaccatgttggccaggatggtctcaatctcttgacctcatgatctgcctgcttcagcctcccaaagtgctgggattacaggtgtgatccaccacgcccggccgatccccacttcctaaagtggttagctatgcaaaataaagaccaggaaaggcaactcaatatgattcatctttatgaaagctgacaagatttcaagataaaacgactttttccctgcagactggggactaggggttggtatgttctcaaagttatttaacaaactggcttcctgattttgctattctggggctgtaaatatcacgttatcaaagcagggagcacaaatgacctcgcagctaaaagccaatccatcaagtcagtcaggtggggctctctgaggtctgctgagtcaaaaacccgtgttccattcccggtccctcatttcctgagctggagggaagtagaggaggtgagactttcctgagctctgggaaaaggatgtggtggagggcacctggcccacggatggtgtttaagcctgtagagggatctgggtacaactgatgactaagttcaaagcaagtttggctctgccttgaatccacagaacacttggagtgattcaacttgggggttcaacaagattcttgggtgggagaaaggaaagggagaagacaatgttagaggcagccacctaggcccaaatccacttgctacccaccaaaagcacagcgaggaggagctgtctgggacatcggcagttaaccagtgcgtgccctggagctgggcccactttttataggcgtgcaaagaccctgccatgaagactttgccatgacaaccagctgtgacgagcactggacatggggagcccttggttagagtgaatatgtaggtgcgatacagggcctggcttgctgggagtctggagggccacctggtgggaacttaccttccacctcatgaagacgtagtctccattcttcagctcttcataatcaaagtcatctgagttaaatgattttgcatactgataaaaagccagaaacttgccctgaaagcagaaaagagagtgtgccgattgactgagagaaggagaggctgctctcagaactatgcttatgtgcccaggtaaactcaccttcccaaggcatgacagctagggacgtggctcccaaaagggcagctaagaccaagtaacagatggggccctatggtcaccccattgaatgcagactcaaccctggggcagatacctggactccagctggggccccactgccctacacctgccttgttaacatggctgaggaaaaggccaaaggatgggaatggtgaacagacagacaaaataaacagacgaaagctaagaaaaattaatgagaagacctctgcaagtaaatccgaagtagcaaaaagagccatgcaaaacagcttagaaacagcctgcccagtctcagagaagagggctttgtgaagcttgtgtctctgcatgatctaggggcttgggccagctagctaagcagacactagaaacacatgatagccttgtccttcgatatctgcgagagattggttccaggacccccatgaataccaaaatctgcagatgcttaagtcccagatataaaacagtgcagtatttgcagataacctacacacatcctcccctatactttatagcatctctagattgcttataatacctaattcaatgtaaatactaagtgaatagtggttatactgtatcgttcagggaaaaatatcaagaacaaaaaatctatacatccactgggtgtgggggctcacgcctgtaatcccagcacttggggaggccaaggcaggcagatcacaaggtcaggagatcaagaccatcctggctaacacgatgaaaccctgtctctactaaaaatatgaaaaaattagttgggtgtggtggtggtcgcctgtagtcccagctacttgggaggctgaggaggagaatggcgtgaacccgggaggcggagcttgcaatgagccgagatcgtgccactgcactccagcatgggcaacagagcgagactctgtctcaaaaaaaaaaaatctatacatcatcagtacagatgcaattttttttttcaaatattttcaaactgtggctggttgaatccacagatacagaacccacatatatggagggctgactacatttacaacaggagattaggaataggttacaaaactgtattttatgatcccattttttaaaaaaaagacaaaaaacaagtatacactgtatacccaaaagagattcaggaagaggttaacagctattttagttttaggtgttgccatagatgactccttttcctccagcttttctattttttcaaatatttttaaacaagcatgtgttaatttgataagaaaacatcttaaataaaaaatcaagacacagagatattaagtcatagattttgtcacatagatttattttattattattttttgagacaaagtcttgctcttgttgctcaggctggagtgcaatggcatgatctcagctcactgcaatctccgcctcccaggttcaagtgactctcctgcctcagcctcccgaatagctgggattacaggtgtgtgccaccatgcctggttaatttttatatttttggtagagatggggtttcaccatgttggccaggctgttctcgaactcctgacctcaggtgatccatctgcctcggcctcccaaagtgctggcattacaggcatgagccaccacacctggtgtcacatagacatttttatcctatgtagactgaatatatggaatcctgactttatagtaccactataatagcaacttaaataccactcaggaaaatctgaggatgcaatacaatatctctgattctagtttataatgaaaaaatgacagcctaggtgaagtgtattagacattgtaaatctcagacaaacccaggtgcagtacagagctccaggagtcccacgtgggaacctgggagtcctccatgagtggtgaaagttaggggaaatgctgagtactacaaaagcagccacaaactgttggaggaggaagcactccataggttcagctccctggctcaaccacacctcacatgccagtaccaagggtggccttcttagttcctctctcacccaaaatgtttcagtccagtctagcagagtctgcagatccagatatcttccaatgttctaacggaagtcaatgggaaaattaagagttgctttccaagtatttaatttgtagtcaacctagcctaaaactgagtgtcactgggcctcaaagactttgctttttgcaggaccaatatgaaatggaaaatagagttgaatgggagagaggctgtggtttactacaaggaagaaccttctactctgggactgtacaggagaggaaggagccatctcgtgaggcagcaagccatgcaggaagagcctagccctgggcaggggtgggcgcagatggtactagggagcccttccaactccacctgctggtggccagcaccttcatacaccacttgggctcccccaaccttctggatactcaggtcttgtgcattctcttgtatcacagagagacacaaatgactgtctagtttttagtgtccatttgctacaacaatcaaaatgtatagaattcaaaaaacgctttaaaaagctcaagtttaaatttaaatttaactgaacctcagtatttgatagatctcctttttttactcaagtaaaaaacagcttggggctgggcatggtggctcacgcctgtaatcccagcactttgggaggccaaggcaggaggattacttgaggcctggagttcaagaccagcctggccaacatggcgaaaccttgtctctactaaaaatacaaaaattagccaggcacggtggtgcacgtctgtaatcccagctacttgagaggctgagagatgagaatcacttgaatctgggaggcggaggttgcagtgagcagaggttgcagtgagccgagattacgccactgcactccagcctgggtgacagactgagactctgtctcaaaaccaaaccaaacaaaacagaacaaaacaaaacaaaaacccccataaaagaaaaaccaaaaaaacaggttgggtcagtggctcacacctataatcccagcactttgggaggacaaggcaagaggatcacttaagatcatgagttcaagaccagcctgggtaacatagggagactctgtctctacaaaaataaaagaaaatgagctcagtgtggtggcacgtgcctgtagttctagctacttggggcgcggaggtgggaggattacttgagcccaggaggttgaggctatagtgagctataatcatgccactgcactccagcatagacgacagagcaagaccccaactctaaaaaaaattttttttaaataaaataaacaaataaaaaacattagtaagcaaagcaactgatctctagtgaggtgaactcaagacaagggtctgcgggagttctctccacagactgctgtgccagaaccaggggagagtttagatagccaggtgtgagaggcaatgggaagaacgagttctagaatctttgctactgacacagccatttctggttggtttatggagggtaaacccattgaacttcttcaatgttaaacaaaaattcaccatcaccatggtcaactaaagcaaaaggctattaggttgagaaaatgatttttttttttttttttttgagacggagtctcactctgttgctcaggctggagcgcagtggcacaatctcggctcactgcaagctccgcctcctgggttcacgccattctcctgcctcagcctccagagtagctgggactacgggtgcccaccaccacgcccagctaattttttgtatttttggtagagacgaggtttcaccgtgttagccaggatggtctcaatctcctgacctggtgatccgcccgcctcggcctcccaaagtgctgggattacaggcgcaagccaacgcgcccagccgagacactgatttttgaagacatggtacttatatgacaacaaatgaaaagatcccaggacactaactgtcttgaagcattcactactgctgagtgagaatgctctacacttgacagttaaaaaggggggcagcaggatttatagtggtgtacttaagacaagactatacttgtctgtcagcagccaggataaaaagaaatgatgtggctctgccctgataagccagtgggcaggcagattcccacaacatcatctccatctcatgccagccccgaagccggaggtcatcattgcatgtttcacagggttttccccaagcagaggtgatttgaaaggaacagtggacagaagatggacaaacaggtgggaaggatggggggacactgttaagattctgatagctgagcagagttctggctggaactctggggttgctatcatcagacaaccatttgctatttaagcagcaggtcagatcgtatttaaactgtcctcataaggaagatggaacaactgaggtctgtgtgcagtgcaaccttttacttggttgcaaagccccagtaatcctcaataagggacaaggtctctggctcccagcatttcttcaattctctagcagcccctagatgacccagcacagatcagatttactcacccagtgtttccgatcaacatcttcatctgcatcccacttgcgagttaagaaagggtgttttttgctgattatttctccttcgaagaaggttgtaagggttggatactcctatggtaaaaacccaaatatcaaaataagatgttgagtgagagtttttaacctttgtacaaaggaaaaataaactttgctttaacttctttccagtacctagacactgctacctgacaatccaaaccagagttagatcgcagccagtttgccaacaggctgtggcaatggacctgaatctaaatcacccagagaatgaagggtttcctggattttgccagcagcagacagcccttctttgacttcaattgttacatgctagtctcttagaaaataatttggatgtttccacaaataaatttttaatattctagcatacaaagcagatcataacttggtagattttactttccaaggttagacccaaagaggctccaaaatcactgtgtctaccactaaggctccctcaagccactggttctccaactggctcagtcatttgtcccttttacaccaattctccaaggttccagggtggattctggggtagaatacttttttatttttcctgagacagagtcttgctctgtcgcccaggctggagtgcaatggcacaatttcggttcactgcaacctcctcccacaccctgggtttatgtgattctcctacctcagcctcccgagtagttgggattacagttggctgccaccacgcccacctaatgtttgtatttttagtagagacggggtttcgccatgttggccaggctggtctcgaactcctgacctcaggtgatccacccgccttggcctcccaaagtgcgaggattacaggtgtgagccaccgcacccagcctaaaataccttttattttggccaggcatggtggctcacgcctgtaatcccagcactttgggaggccgaggtgggaggatcacctgaggtcaggagttcaagaccaacctgaccaacatggagaaacctcatctctactaaaaatacaaaattagccgggcgtggtggcgcatgcctgtaatcccacctactcgggaggctgaggcaggagattgcttgaacctggaggcggagtttgcagtaagccgagatcacgccattgcactccagcctgggcaataagagtgaaactctgtctcaaaaaaaaaaaaaaaaaaaaaaagtaaatacttttttcagtgttctacatgttcagagaaacttctagtaatgaactatacaaatggtccctgaaggtagtcttagaataccttgatacatagggatacgtttaattctgtcacatgaactaagaacaacttatatgaggaaaaacatatgaactaaaaacaatttatatgaggaaaaacatatgtaaatcatgtctgaatgtaaaaaccacaccgtggaaaacgtaagcaagaagccatgtgctggcttgggtgctttgttaattgctctttgttcatgtgttaataagtaggcaccaatgattttaaaaaagattaataagacaaaaagttaacaccgtaaaaagtctacatttctctgcatttgtagaaaccaaccaagcacccacctctcaggctaccttgccaagcccctggtgtctgccaggagcatggttatgagagtcactggcctggaaaaccacagattacagtcctaacatcaaggactgcagaaggcccacgtttttccttcagatcagatgtaagcccctcttattctgcatcaaaaacctcattctgatggctttgccacatctaccaacctggcctgcatgtagtgtaggaccttcctgagagaggctgccacagtaaaagccactggtgcagaggctcccaggaaacagaacgtcaccaccgctgcaggtggctcaggaggcctgctttaggatgacaccatggaggggatctgtttccttaacagtgaacttaaaatatgataaatctaatactgccccaaacccacaacccccctatcctaacactgttgctggattcttcacataaatatttaaatacatagactgaaaaaatgagagaggagaaattttcctaaatgtaaacctaatttttaaggtataagctaacttttttttttttttttggggggagggacagagtcttgctctgtcgcccagaccggaatgcagtggcacgatctcggctcactgcaacctctgcctcccgggttcaggtgattctcctgcctcagcctcccaagtagctgggattacagatgcatgccaccacgcctgtctaattttttgtatttttagtagagacagggtttcatggtgttagccaggacggtcttgatctcctgacctcatgatccacccgcctcggcctcccaaagtgctgggattacaggcgtgagccaccgcacccagccggtataaactaacttttaattataatctgttctaggaaagactactaaggaaaaaagttctcaataaatcagcacctgcatttgagattttaaactagaagctattttttttttttttgagatggagtctcgctctgtcgcccaggctggtgtgcagtggtacaaccttggctcactgcaacctccgcctcccgggttcaagcaattctctgtctcagcctcccgagtagctgggattacaggtatccaccaccacgtgtggctaatttttgtattttcagtagagacgggtttcaccatcttggccaggctggtcttgaactcctaacctcgtgatccacctgcctcggcctcccaaagtgctgggattacaggcatcagccaactacaaactgtttatattatttttccgagtttcaagctttaatcttttttctgaacttccttgaaagggataggatgaaatgataaagaggttttaatacaaggccaagcctggtggctcacacctgtaatgccagcactctagggggccaagacaggaggatcacttgagcctaggagatcaagatcagcttgggcaacatagtaagacccggtctctatttttaaaaaagggaggggtggggaggaggtcctaatatgattaaaacacttatggtttaaatcactagttttcttaatgaataattctgcattgacttctttgtaaacatactttaggcagtatatcagggtaactacagggtaccctcaaactttgagaattaaataaaataaatacctaataaatgagattcagtgtgtacagaagtcactgaaaagataaaatattctcagagcaggaacaggaaattcaagcactttattacagcccaatgaggggtaatttatagagcggacgaaaaaccatgtcagaagaaaggatatcgagaaatgaataacagaggcagcaaaagcaggagtgggcatcccttggtgggtctggctgttgtcagacatttaagtcccccaactaatcctcccactgattccaggctcacccaaaactgtgtggtgataggtaccacgactttccatgtagacctgtcttctggaggattaacattcaattggccaataagtcaacaggaacttctggaacatacaggaatctcattctctgacaaaaactggcacttttgtttttgtgagttttggtaggtgtgacctgtctccctagttaagcacaagtctagcacaacttcagctggagcttccaacccttccaaacccaagtaatgagtaagtggggggcctgcccatggcccccaaaggctgggctcccaggtaacccctgaaagctgctgggttccccggaaaggtcgcctctcttgactgacggatggctcaaaagtgcaaaaagaatgttatttcatatttattctttacatttctagaatttcacttccagaaggcatgaaaacaaactttaaagctccgttttgcaatgtggcaattcctcaaagagttaaaaacagaactatcattcgacccagcaatcccattattgggtatacacccagaggagtataaatcattctactataaagatacatgcatgcaaatgttcactgtagcactattcacaatagtaaaaagtgggtcaacctaaatgcccatcaatgacagattggataaagaaaacgtggtatatatacaccaaggaatactatgaagccataaaaagaaatgagatcatgtcttttgcgtgaacacgggtagagctagaggccgttatccttagcaaactaatgcaggaacagaaaaccaaatactgcccttataagtaggagctaaatgatgagaactcatgggctcaaagaaggaaacaataggctcaagcctgtaatcccagcactttgggaggctgaggcaggcaaatcacctgaggtcaagagttcaagaccagcctagccaacatggtgaaaccccatctctaccaaaagtacaaaaaaaaatttagcctggtgtggtggtacatgctacctgggaagctgagcaggagaactgcttgaacctgggaggcagaggttgcagtgagcagatattgcaccactgcactcaagcctgggcaacagagcgagacttcatctcaaaaaaaaaaagaagggaagaacagacaatggggcctacttgagggtagagggtaggagaagggagaggagcagaagaaataactattcagtactaggcttaatacctgggtgacaaaataatctccacaacagttacataggtaaaccgtgacataagtttatctatagatcaaacctgcgcatgtacacccaagcctaaaataaaaattaaaacaaacaaacaaaaaagctgtgcttgtttgtgaatgtgaggtagctaagaggccatttagctccttttttttttttttgacacttatctccttttttttttttttttgacacgaagtctcactctgttgccgaggttggagtccagtggcatgatctgaactcaccacaaactctgcctcctgggttcaagcgattctcttgcctcagcctcctgagtagctgggattacaggtgcccgccaccatgtccagctaatttttgtatttttagtagagatggggtttcaccatgttgtccaagctggtctcaaactcctgacctcaggcgatccagctgcctcagcctcccaaagtgctgggattacaggcatgagccactgtgcctggcctatctccattttagtagatacttttccatactgtatacgtgaggaaggcaactactatgactaaaacccaaattatagtttaattaaaataaattaaaaatttgatatttttgccaggcacggtggctcatgcttgtagtcccagcactttgggaggccaaggtgggtggttcatctgaggtcaggagttcaagaccagcctggccaacatggtaaaaccccatttctactaaaaatataaaaattagccaggtgtggtggcacatgcctgtaattccagctactcgggaggctgaggcatgggaattgcttgaacctgggaggtggaagttgcagtgagctgagatcacacaactgcactccagcccgggtgacagagcaagactcttcctcaaaaacaaaaaataaaaataaaaaattgatattttaacaaacataaatggaaaagaaaaaaaacccaaatacaggtacaaaatttattcaaagattcattgtagttttctgcattttactattatctacggcaaccatatactagacttataattttaaaagttatcaggctgggtgcgttggctcacgcctgtaatcccaacactttgggaggccaaggagggtggacatttgaggtcaggagttcgagaccagtctggccaacatggcgaaaccctgtctctactaaaaataaaagttagttgggcagggtggcgcacgcctgtaatcccagctactcgggaggctgaggcaggagaatcgcttgaacttgggaggcagaggttgtggtaaggtgagatcacaccactgcactccagcctgggtgactgagactctgtctcaaaaaaaaaaagttatcggccaggcgtggtggctcacacatgtaatcccagcgctatgggaggccgagacaggcggatcatgaggtcaggagatcgagaccatcctggctaacacggtgaaaccccatctctactaaaaatacaaaaaaattagccgggtgtggtggcgggcacctgtagtcccagctactcgggaggctgaggcaggagaatggcgtgaacccaggaggcggagcttgcagtgagccgagattgcaccactgcactccagcctgggtgactgagcgagactccatctcaaaaaaaaaaaaaagttatcacatagttgcacaactttgtgaatacactaaaaaccaatgaactgtatacttcaaatgggtgaaatgtatggtatgtgaattatctcaataaagctactaaaaaacattatttaaaaagaattcttctacatctaaggcctgagcaggacttgctttaacgcaacacccctgcagcagcataacgtggtctatttattgctggaccaggaacaggcaactctggggagggtatgtgctcatcgaggccacgccatctgcagaggttctgttaagagcctagggctccccttgggttagcccccattgaagggccattgtcagtgccccctcctcaaaggagcctgactgctgctctcgactcacgggggcttcctaaaggaagggctacttgttcccgatggagagctcaatgccattagcatttctgtatacttcttcaagatttcgaatgctacttaccatttctgtgcagcttgttatcacccaaatgactggttttggagtcagcgttaacattccaatgccttacacacttgctggtttccttatgaaattcagtgtttatgttctgcacccagttaactaatgtatttggctacctgagagttgagcatattctgttttagtatcttttctcctaccacaaacccaaaggctggaatcctgtattttgctatcacttctactcctacttgatttgatacaattctcgagttaaagaagaaatacctttggtctcaacaacaaacttcataggagatccttaatcagttaagcttctaatagaaaagcagataggaaccaggagccagaaacttgtcttaagactgaggctcatcaggactttacaagagaatcacatattagtaccatatttgagtctgtcattttctctaacattctttccttacccccagaacaagtccactgattgtcttagacagagcagggatttttttttttttttttttttttgagacaaagtttcgctcttgttgctcaggctggagcgcaatggtgcaatcttggctcactgcaacctccgcctcccgggttcaagcgatcctcctgcctcagcctcctgagtagctggaattacaggtgcctgccaacatgcccagctaatttttatatttttagtaaagatggggtttcaccatgttgaccaggctggtcttgaactcctgacctcaggtgatccatccacctcagcctcccaaagtgctgggattacaggtgtgagccaccacgcccgaccccaattttttttttttttaaagagagaggatcttcctaggttgcccaggctggagtgcagtggctattcacaggcatgatcacagcacattgctgccttcaaatcctagcctcaagcgatactccagcctcagtcttctgagtagctaggactacaggcacacaacaccatgcctggctaatttattaaaaattatttgtagcgacaaggtcttgctatgctgtccaggctggtcttgaattcctggccccaagtgatcctcctgctttgacctcccaaaatgttgggattacaggtgtgagccacagcacccagcctggagcaggaatttttaattctcaacttcgcagatgaggacactgaaagaagttaaaggtcacagatgcaggaaggggcagaagaagaatgccaccccagctcctttccactgccccatccagcacagcactctgtccaaatactgctggatcatcagaccatgagagctgacaaaggccagaggccccctgcagctaggtccagcctgggcattcccagcattcggagggccagtccagctacctccttccacttcctgtttccttgctaatggaaaagaaaggatgctcctccttgctttctaaagtcccaggagttctgaggtttaaaaacttggttcaaagaaaataaaatactctgcacagcaggtacttctgctggaaactagatggtcacttccccttttttttctttctttttttttttttttgagacagggtcttgctctgttgcccaggttggagtgcatggtgatcttggctcactgcaacctctgcctctctggttcaagtgattctctgtgcctcagactcccaagtacctggaactacaggtctgtgccaccatgcccggctaattttttttttttatgtttagtagagatggggtttcaccatgttggccaggctggtctccctacctcaagtgatctgcacacctcaggctcccaaagtgttgcgattacaggcatgagccaccgcgaccagtcagtaacttttcattgttccaattaactaagaggcttaaagaacttaaaagctcattttttataggactgatgcttatctcagaaactgttaaacttatgatgagggtggcagctatattcttattattttttcccccaaaaaggattaaaaataaaatcaatagtgttggttgtgacaattatgatgtacttataaacttttctttaaaacatttgtgaatctgtacacttctcaacaggacacactgaaactgcctgttttatgttccctatacagtagcaatgctcaggagtagtctgctttaattaggcctcaaggagttgagaccgcctgccctgaaccccaatgagcctgtggagcacaccacagactttctagtgctggtttgtgtgagcaagtgcttacctcagtaaggcctttaatcttcaagtacccacaaaggtaagagttccccgtgtccacgtgctgaaaagaaaggatacacagcctgtcacaaatagataaacttactaggggacatgcaggagggtactctgcaaatcctgtgaggccagactggtggtcagtgaacacccagggcagtccaaggctcacccagtctctggaatcttgataagttctccccacacacatgcctgttctgccaaagcaaactgatcccaagaccctctcaactttcttcagctgaatatcatgagactgaagtgtctttctgaaatggggtgcccactcaaattcattttctgtactatcttcaacacacgtctcccggtcatctagagaccttgagcattgctgggcacagggcctctgtctctgcctgtacacgtggtgtcatccctaacctcaggcttgactttctttctaatgtctttcaagcctttttctatttctgtattgctcaatcattggtctaggaggtctgctcctcttctagtttttacactaaacatcatcctgcattatctctttatgaaatgggcagactgttcagaaatggcatcttataaagatttatgtggtataaacttcagttatgaaccaaaatgccaaccaaaagtctgactatattgtgaatgttcactctgtgcattttatatatggatgctgtgtttcttaatgaaaagagtcaggagcctaaaataaatagaaataacaggcatagtagactttgaggtttagcagtcaccaattactggttgctgagacactgccggatgcctacccaacaaacaatttcctcctttttcacgctggcagggtccagtttttgctctggtacctacctaccacgtaagacttggtcaacctgatggatctaaggcacacaggtgtccctatccccttgcaagtcatgtatttaggggtgagtgacccatttctggctcatcagatgtgtaagtctcctgagtgcatctgtgaaaaatccctggcttttgaagaggcgcatgaggaagaaatggcttttttgtcccctagtggtgacagtatccgcatggagtgtccagtcctgggggagacatctagaccacaggggagaaacaggccaggaaatgctgaggatggtagttagaaagatggaaaaaactgggcccatcgtaggcctctgaattaaccaacctgaagccacgtcacctcaaaaatcctcctgatgtgagatttcacccaaatctatacagactcattctgaatagggagtttcagatttcatgacaattggattcacttacaaggtaaatccttgaattaaagcaaaccaagtacaagggtacctgtggtacactgagattttaatgttaagtgaggtcttatttcaagaaattagaatagttttgtggcatttatcagatttgtgaacctgattacttccaattataccataaatcaaatactaagccatgcttaaaaactgtaatgaacttagtcaaccagatgatgtcagcaccaaagcaaatgaacttcaatgaagccaaagtgccttcacagtttggtgctggtgacaaaggtattccctgtgaaaactgccaaagcattttaaatatcctcatctgctgaccttggcactggacattatctaaaacagctaatccacgctaacatggttcagcaaagaacttttattaaaggacacataattctaacctgagtctttaaatttcatgtatgcaattctcattgaattcaatatagtttggagtttcacagctgctgaaaagtgtatcaggtggcaaggatacttgctaataagattaaaaattgaaatgtaaattggctaacattttgcatggattatcacatgctcaagaatcagaatttcagcttggcctccattcaaccaagcgtctctctactctgcccaaattgatcttgataatggttggtgaactcaaatacaccacaacgcatacagcttttaccaaacggcaggcgagcatctcaagaaagataacagggcacgtgtttagcaagaaggtgtcacagcacagctgtgtccaacggctgttcttttaaatattcctttcacagcgaccagggctcccttctactgctggcttcttagatggcagaggaggaaagaggagtcacagtaagtgcggggtggagaggagacccagtcagaaactcacaaaggtttgaggaactctttacactagaatcacagaaaagaaagtactccaaaacaacaacaacaacaaaaacacaagaaaagatgcacaacagcacagtcattatagaaattcaaatcaagactacagtgagagaccacttcaaaaacactaggatggctacaacaaaaaagatgaacagtgagtgttggcggggatgtggagaaactggaaccctcacccactgctggtggaaatgtaaaacaatgcagggccagtttctcaaaatgttaaaacccagttaccatgtgacccagcaattgcactcccaggtagttatctaccaaagtgaaatatacatccacataaaaacttgtacataaatgttcatagcagtattattcatagtagccagaagtggaaacaacccaaatgtccatcaactgatcactgtataaacaaaatgttgtatatccattcaatggacaattgttacaatgaacaatgcaaaataaaaaggaatataagtgctgatacatattaccatatggatgaaccttgaggacattatgctaagtgaaggaagccaatctcaaaaggacaaatactatgtgattatatgaaatgtccagaatagacaaacaacaacaaaaatagatgagcagttgcctaggattggagtgggggttatggctaagggttacatacaaggtttccttttggggtgatgaaaatattctaaaattaggttgtggtggtggttaaacaactgtgaatatactaaaaactattgaattgtacaccttaaataagtgaattctatctaaataaagatacaaaaagaaagaaagaaaacaaaacaaaacaaacaaaaagaagctgagttataaaaggcagaagtattttaagtctaagaaggctgtgtctgacaaactagtcctggctgaaaaaccagatgatggggcaattcacatgccactgactagtcgtgatgatgaccaagcagctcaccaatccagatgtagggcagcattcattggcatgaccaccacccccaccatcagacatcttactcaagtggctcccagccatccaccaggtttctgctctgggctgcctgagacctatcagccctgccccaactcaaccactgcttcccctggttcatgattctccttctgaaaggagctcagaagtgataccctaatgacagaagggagcagcagttgctgcagtagccaaagcagactcccctttgacgcctggctatcttgccaattgtcccctactacatcagaaaccatcaaactgaacaacagggacaaatccaagatcatcccaaacgtgacccacccagggatctcacctccagaattctatgactaggtgcaaaacaaaccgaaaaacccctgtaccttcatactcgactctcacattttaagaagaggatcactacattaggcatacagttatgaagacaaaaatatttcagccacaatcgtatttccattataataactatcgtggctcatgatagaactttacagcccaaagatatgattaacatgacgatgctgtttcaagtaagcagagaaaatgatttattcccacaaagcagtatgagaataaaagagtgatgagtgctccgcagttagcagaaagaaaaggcaccctcattgtcttttggatgggagacctactcttcagaagtgaaactaagatttgttttaaatgaccaaaaggagagcttgaggaataaatatactgtacattccaccctcacaccccggggggtggggcgggggggaggcagtggggcagcacacagtgcctttcagagggacaggtgtttggaggggcttctgggaacagcctggcagatgaggtgtcagactaaggaaaaaaagggcaaagggaaggggaaaggggtccttagtcaggcaggggtaggtatagaggaggaagagttttgtggggaggggagataaaagagtattcaccactgccactccatttcagctggcaaaaagtgtcaagcctgagaggagtgaggtgtgggaaaggcccagacaagtgaagctgtacttccgaagctgatcagggactggcagcaggtattcaggaatccaggtcaaatggggggaggcgactggacatgaactaaaattgggtgagttagatttcccagtacatgggtaccagagactaagaggaagccctgtgcctgtgtagagaaaagttaagaacaggaaagagggtcccctggaaccaggatcgagcaagacgaaggtatggggtggggaagtctggatagaggccaggaagactgggaaaagactgcaaatggtcccagagcaggggcaggaggcctgggggtggagaagctggaaggagctgggtgcctggaccatgaagagacagaagcagtgagtggaacaggggacccaggaggcaacatcccaacagactgtgagcagcactcagggagtgagtgcctggtcttgaggtgaggccagggcctgaccaatcagttgcgggttaggtgctcccccgtctgggggtctgatgaagccctcctaaggagatctcaggaggaggaagaccccaaggtctgcggattcctggaactgaggaaggggcaggaggacatgtctcaggtctgagagaatctgacgtgggcccagacatggggagggtcccaagtctggtgaaaccaatggagagttcttcagggtctgaaaagggctggtggcagtccctgatctagggacgacaggtcatggggaggaaggacccaggccttctccgagtcatgaggggcttccggatcccagacgggccggtcacgggcttcaagtctgggagtgttcggggtccgccaggagccggtcacgacgggctctgggtccgaaggggcaggtcagggctggggctcggagagtgtgagacacaggctgggaaggtcccgggtgggaagcgccgggtgcaggaggccccggcggcgagggcctgttccgcggctgcggggtcgaggagccgaagcgggcacggcccgtgagcgccgcgaggaggccctcgggccccggcccggcccggcgctcacctgcagcaccacctctacgtcgtacgagttccccttgctcttctggtggccgcggaacttggagccgctgtagagcaggctggtggccacgccgggctgctgggtgttgatgggcggcggcgggatgagtgaggccgcggaggcagcggaggcaccggccggcgggggacactcggtgcggaccggcatcgcggggtcccccggagccagggctggggggagtgggagaggaaccgccgccgccgcgcgggagccgaggagggtggcggggagggagaggccggggcgcgcacgcgcggggtgggggcgggaggggcgaccacccgcccgctgcctgcggagcaagcgctccggccgccaccgggacccagggacctgcgagcagggcctcccagtcctgagctgggtccccctcccgacttgccctcgcgcacacatacacacacacagacactcacagacacacaacacacaaacacacacagacacacacacaccccgccccttccgattggctcaggcgagcctggggggcgggagcaggctcaggcggcgcttccgcccattggcgggaggagaaaacacgtggcgcggtgcgcgagcagcccgctgggacttgtagtctcctcgccgaggcgcggcgtggagggggcggggcgaggtgcgtttgtgatgctgattgactgggggtgtgcgcaggaggcgcgcggcggcgacggcgcgccgtaggtgtcatgcggaagatggcggcgtccaagggaggttgagggctctgaggaggcgttgagaggtttccgtacagcccgaccgtgcggctttggggatcccatcgctctgtgtttcctgctccaggtttcgcgtctcgcatcttcccagaccctcgggcgcgatgtggaggagctgcctccggctgcgggacgggggacgccgtctcctgaatcggccggcgggtggccccagcgcttctatgagtccggggccaaccatcccgtctccagcccgggcttacgccccgccgacaggtaagaccatgacatgttcttttgggttggggccgagctggggtaaggtgggcttcgggcttcggctgtgcaaagcgaagtaactgaggcagggttcaggctcatgaggttatgcaggccagtcaggtctttttacagatgagaaagtgaagcccagacaagggcagacgacccgagagggaacagcgagtcacgcacgatacagtaattgatatttggcctgtgcaggttttctcaaagcttatggctgccctccctttaataaggaaagcaggtgtcatctttgttttcaaaaggggaagtttgggctctgaatcaggacttcgtctgggttacaggcagactctctcagaggtttgtggtgtctgtctgactgttttccgtgtctccactgcccaacacaagacctgcccagaagggacctagaacctgggccttcattcctccatcccgggcacttctgctgcaggtttcctgactttccctcctaccacaacctctgccatctgcagccttctctcctaaatagaaattgacacctccacctctgactgtggagtcacctccacctccaactctgatgaagcttagaagtagtggctctttcattgctgatggtgagtggtgtcagggtaagagtgagaatgactcatttcagtgaatgaagagcagtaacaccctcccaccattcaattagttttattgtgctggaggcaggaggcacggttgtctttaagacccacctgtatgtattggtagagaagctcaattaaagaagaaaaaggcccacctgaatgatgttcactgttcattgcaaaaggttataatatcctgattaaattgtggtttataatatcctgataagggacatacaaagaaactgtgagaacacagagaatcgcttactcccatcttggggatgttcagggtttagaatgggtcttgggtgaaagggcgtttgtttaagctgagccatgatagatgagtaggagttcagcaaaaaggtgggagagtgttgggtatctagaacgtgtccagggtgacagcaaggtatgagggacttttccctgacactgcctgttttagaaaatccagaacttcacaggcagtttggcattgtggcaggagtgcaaatctaggatctgatgctggctgaagctctgaggtctgtgtgatcttgggcatgcaactacttcctcatttttctccatgcgttgaagtactaggttgcctttgaggatctttctggctgtcaagttctttttttttcttcttcttctgtttttttgtgtttttttgagacggagtctcctctgtcacagaggctggagtgcagtggcaccatctcggctcactgcaacctccgcctcccagattcaagcgattttgtggtctcagcctcccaagtaggtgggactacaggcgtctgccaccatgccctgctaatttttgtatttttagtagagatggggtttatattgactaggctggtctcgaactcctgactttgtgacccgcccacctcggcctcccaaagtgctgggattacaggcgtgagccaccgcgcccagccaagttctataactttatagaaatggggaagggggctggatgcagcagggagctgaagtttcacctgcaggactcaggggaagggcctggaaatgggccatgaagggccagtaaagaagagaaaggaagggcatcccagggaggcatagcaaaggggacacattcaggagttcaccaagttggcaaaaagcaaagggttaattaatttatttatttacgtatttatttatttattttgagatggagttttacacttgtcacccaggctggcatgcaatggtgtgatcttggctcactgcaacctctacctcccagatacaagcaattctcctgcctcagcctcccaagtagctgggattacaggtgtccgccaccacacgtggctaattttgtatttttagtagagatggggtttcaccatgttggccacactggtcatgaactcctgacctcaggtgatcctcccgcctcagcctcccaaatgctgggattacaggcgtgagccaccatgcctgaccacaaagggttaatttagatttgtggatgctcactttacataatggtggcacttgatctactgccttcttttcctttttaaaaagcctaaacttactagttaggctcttggaagtacctggcacatggtaggtagtcaaatgtgaaagaaaataggaatgaatgaatgagaagggaggtgcataaatcaggcccatgcatgcttttttttttttttgagacagagtcttgcactgtcacccaggctggagtgcagtggcgcaatcttggctcactgtaagctccgcctcccgggttcacgccattctcctgcctcagcgtcccgagtagctgggactacaggtgcccaccaccacacctggctaatttttttgtattgtcagtagagacggagtttcaccatgttagtctggatggtctcgatctcctgacctcatgatccaccctcctcagccttccagagtgctgggattacaggcatgagccaccgcgcccggcccccgacccccacgtgttctctctaaagaccttactagttgtgagatatttgtgcgtatttgaagtagtagaagattaaaccgcagtgggttcttctcaatgaacacttcagtcagcaagctgattgaacttggccacttaggaatggccatgccattgaaggttatcagaaggagaggaggagtttacgaaagggtcactgaggtgttggagaaggagatattgcaacaagaagacctatatgaggttgttgtggcagtttagttctgcaccagcttatcagaggtctattgactcccagagtggcaggtgttctggagaaacctatctattcagcgtatctggctgaatgcaactgcctaatgaagtcaaggctagaagtcttgtctctgctatttaccagttgtctgtcaccaagacaagatgtttagcttctctatcacctccgaggcattagctgccttgtcatcctcatagaatagtggtgtggattgagggagattatgtagtctgtagatcagggtccagcctgccacctgtttttgtaaatagagttttattggaacacagccacatgcattcatttacatatcatctatggctactttcactacagtggcagagttgaatagttggaacagatattgtatggcttgcaaagcttagaatatttactatctgattctttgcagaaaaagtttgctaaatgttatacatttggcctgaaggatttttttaacagctttattgagatatttacttgctatacaattcatttacttgaagtgtaaatataatagtttttagtatatttacagaattgtacagccattgccacaatcaattttagaacatttttatcacccttaaaagaaacctgcaccctttagctatcatccacccttactacttccatcccttggcaactactactttcctttgttcttttatagatttccctgtttgggacattttatataaatagaatgtggtcttttttgactgactttttcacttagcataatgttttaaagtttgggttttttttgtttttttttgtttttaagagattgggtctcattctgttgcccaggctggagtgtagtggcacgatcacagctcactgtaacctcaaactcctgggctcaagtgatcctcctgcctcagcctcccaagtagctagggctacaggcacacaccaccatgcccggctagctttttagtgctttgtagagatggggtcttgctcaggctgacctcaaactcctggcctcaagtgatcctcctgcttcggccttccagagtgctgggattacaggagtgagccaccatgaccaaacgtttttaagttttatccaccttgtatcatgtatcaatgactccattcttctttattgccaaacaatattccattgtatgtgtaaatatgccacattttacttatccattcatccattggtggacacagggtcgtttctaccttttggctaatatgaataacgctactatgaacattcatgtacaagtttttgtgtggacatatgttttcatttctcttggacatatacctaagagtagaattactgggtcaaatggtaactctgtttaacttttggaggatctgccagactgtttttcaaggtggctgtgccatttcacatttccaccagcagtgtttgaggggtccagtttctctatatctcaacacttgttgttgtcttttttattacagctgtcctaaagggtttgaagtggtatctcattgtggttttgatttgcatttctctgatgaattatgttgagtatcttttcacgtgcttaatggctatttgtatattttctttgaagaaacgtctattcagatcccttgaccattgtttttttttaaagagagggggtcttgctctgtcacccaggttgtagtgcaagtggctcagttacagcttactgcagcctcaacctcctgggctcaagcgagcctcacacctcagcctccaaagtagctgggaactacaggtgtgtgccaccatgcccagctgactttaaaatttttttgtacagacagggtcttgctatgttgcccaggctggtctcaaactcctggactcaagcaatcttcccacctcggtctctcagacttgaacatttttaaattgggttatttgttgttgtttttgagacagggcctcggtctgttgcctaggctagagtgcaggggtgtgttcatggctcactgcagcctcaacctcccaggctcaggtgatcctcccatgtcagcctcctgagtagctgggactacaggcacgtgccaccatgcctggctaatttttgtatttttgtagagacagggtgttgccatgttgctcaggctggtcttgaactcttggactcaagtgatccacctgcctcagccagccaaagtgctgggattacaagctcgagccaccatgcccagcctatttgtctttttgttattgagtcgtaagagttctttatgtatttgggctgaagaattttgatacctgaaaagagttggttagagccgccctaggattacagatggccctggagttagaatttcacctttaaggtttaaggcccaccagatggcactgttttaaaagataaaggcactgagacagctctgaaaccagtacttcctcttcttggtgcactgtgggagttgtggttcctgaggctggtaatctttctaaaggaaaggccagttctgcatgatcctacaaagctaggctgatttttttcatctttaaagacagggttaccattgatgtctgctaaccatgtattcaccgagaacatggaagcttcataggtttctggtggtctcacattttgtcttatgtgacattgttggggaacatggatcccccaaacgaattgtccagatcatgttcttttttttttttttttttgagacagagtctcattctgtcaccctggttggggtgcagtggcgcaatcttggttcactacaacctccgcctcctgggttcaactgattttcagcctcctgagtagctggtattacaggcaggcaataccacacctcgccaattttttaattttttgtagagacagggtttcaccatgttggccaggctgctcttgagctcctggctttaagtgatctgtccccctcggcctcacaaagttctgggattacaggcatgagccaccatgcccggccccagatcaagttcctgtatgcctgtgtggagcctttacttggctccctttgctgtctttgcagtgatctacatgtcccccatatgtggccccattgccctctctagcatcttagagaatcttgcattctccttctgaccatctgtctagtccacaactgctctctagaaaccctggtccttcatgcaacctgtttcttcatctggaaactacttccacagccctgctctgccaaaaaaaaaaaaaaaaaattgaatcaatcagaaagtttggtacctcctgcctcaccttcaagttgcaatttaattctgactaatcgttccacgtgcctgccccatcacagaagtcaccttattgtttgcctggtttagtgtctgtattcctactagacagtaaatggctggagagtgcagagatgagctttgcacatgtcccatccccaggacttgtatgtcctggaacatgatcagtactcaccaaagcttgttccaagacacgtttgcccctccaagtgtcagtgggtcattcaggagagcccctggctaaaacacatctatgtgcacctgccttctaatctgaggcctggcggcccctgggcttcttttgcccttctgccgtctcattttctgcatggttttcttctgcttggagaaatttttggtggcttcttccctgccctccatctatcccactcccatctagttttttcttattcagttacagaagtgagcctggccaacaaaacagaaaaaagacttccctcttgggaaacctggctgtcccaggagcttttgaaggttcagccctgtgctggcagttcctgccttgagtctgttcgtctgccccaggtctcttgggttcacttcccagaccgggcctggaagtatgctagagtgctcactcttgtacatttgtacactctgctggctcttcctgctgacatgggaagaccctttccccagtgttgagtcagagctttcagagcccttcccaacttcctgcctggcctggcttttatacatgcagcccagcctgttgcattggaaaacacaaaggacatggtctacctcactccagacctgagagaggaaaggaggcctccagacccatgtctagcctgccatttggatatgaccaggacagcatgtagagaaatttaaaagcagtagggtgctgtaaacttctaattttagtgtcaaacgtatgagataatcagtgttgtgatttcagatgaaggtgccatagtaagacaacatcatcttggtggacagatctgatcctaaaaaaacactttattttcttttttttgagatggagtcttgctttgtcacccaggctggagtgcagtggtgcgatctcagctcactgcaagctccacctcccgggttcacgccattctcctgcctcagcctcccaagtagctgggactacaggcgcccgccaccacgcccggctaattttttgtatttttagtagagatggggtttcactgtgttagccaggatggtctcaatctcctgacctcgtgatccgcccgcctcagccccccaaagtgctgggattacaggcgtgaccaccgcgcctggcctaaaaaaacactttaaactctgtctattttattcactcttgtatcccaagtgccaagacacatggtagacacacacatatttttgtgggaaaacaatttgggccttagtttagtaagtgcaaatgtggaatgcaattttgggccctctgtctgtaagtattagtgatagcaaatgagatttatagaaaactgatatgatgggaaaacataaaaatatttggagtaggctgggcgcagtggctcacgcctgtaatcccagcactttgggaggctgaggtgggcggatcacgaggtcaggagatcgagaccatcctggctaacatggtgaaaccccgcctctactaaacaaaatgcaaaaaattagccaggcgtggtggcaggcacctgtagtcccaggtactcgggaggctgaggcaggagaatggtgtgaaccgaggaggcagaacttgcagtgaaccgagatcgcgccactgcactacagcctgggcgacaaagtgagactccatctcaaaaaaaaaaaaaaaaaaggccaggcgcggtggctcacgcctgcaatcccagcactttgggaggccaaggcaggtggatcacgaggtcaggagatcaagaccatcctggctaacacggtgaaaccccgtctctactaaaaaaaaaaaaaaaaaaaaaaagccaggcgtggtggcggcgcctgtagtcgcagctactcaggaggctgaggcaggagaatggcgtgaacctgggaggtggagcttgcagtgagctgagatcgcgctactgcactccagcctgggcaacagagtgagactccatctcaaaaaaaaaaaaaaaagaaaaagaaaaaaaatatttggagtaaaaccagttgcccacttctccattacccttccctgtccatgcacacatactaatttctcctgaattttcatggtctatttgaattaatgaaattttaacttaagcttgttttttttttttttttttttttccccaagagacagggtcttgttctgttgcccaggctggagtgcagtggtgccatcacagctcacctgaagcctcagcctcctgggctcaagcaatcttcctgcttcagccttcctagtagctggggactacaggcatgtgccaccatgcctagctaatttttaatttttcttttttttttttttttttttgagatggagtcttgctctgccacccaggctggagtgcagtggcgtgatctcagctcactgcagcctctgcctcccgggttcaagcgattctcctgcctcagcctcccgagtagctgggactacaggcatgtgccaccacacctggctaatttttgtatttttagtagagatggggtttcaccacattgaccaggctggtctcgaactcctgacctcaggtgatccacccgcctccgcctcccaaagtgctgggattacaggcgtgagccactgcgcccggcctcatttttgtattttttgtagagatggggtctcatgttgcccagcttgggtcttgaactcctggcctcaagcagtcttcccaccttggcctcccaaagtgctaggattataggcatgagccactgcgaccagccttttttttttttttttttttttttttagcgttaaaggcaaactatttggccgggcatggtggctcacgggttggatcacttgaggtcaggagttcgagaccaacctggctggcatggcaaaactctgcctctactaaaaattcaaaaattagcctggtgtgttggcgcatgcctgtaatcccagctactcaggggactgaggcaggagagtcgcttgaacccaggaggtggaggtttcagtgagctgagattgcaccactacactccagcctgggcaagagagtgagatgccatttcaaaaaaaaaataataataaaataaataaataaagcaaatgatttactcttttttcttccacatgctgcatcattatttccaataaataacttcagttagggtcttcaaagactttgagaactcagtgaacacatgaacgagtgaacaaacgaatgaatgaatgaaagttttgtgtttgtcacagatgtgagagactgagttatagcttatagcttccaaaatgtgacttctttgttatcagttgagggaatctgcataattccttagaagtgctcttggttgttaatccctccagggtaaaagaaggagactgtttcatgtaagattttattcaagttattttcaaaagaaaacaaaggacatagattttcccattcttgaaggaaatgtttggagttcctgttggatacacaagcaagctggttaattaggttaattaattggagagaggggatgggaaatgcccttgggagctctgtatcctgccgatgtatcacacacgcacaccctgcgcacgcacactggctttccactcactccttagaggcatcagagtcttgcctgaaatgggtctctagctttgtcccactcagacaccgactttaggtttgaactcgttgtgctggcatgaggtggcactggtggtggggagggtgggagagcatgccgagatgctcctgatcagacttgtccccaggctgcggggctggcagaggtatgaccagcatgttctgttcctcccttctccctggagatcagatgttcccttcccccagctttaatcagaagcggttgattataccgtgttgagtagggcagaccttgaatggggatatgaaaatcaagccaatcaatcaacattagcagtaatgatacaagctggtcctgtcgcttcctgagttgtctcaacgttattttaaactgcctctttgaaaaatctttcttacagaaaggaagaggttttatcagaatgtcagcatcacacagggtgaaggtgagtgtctgaaattttgactgcctctttttttttttttttttttgtgaatggttgggaacatttttcatcttcagctggtttcatggtgcgattatccttcctgctttttgtgagatatatttctgtaagggactcagagttggctttgtctgcaccaattcaagtggctaaatataggaatggtcacttgattccacttaacaaatccctgagagtttttcatttgatctttcaaggtggctttgagataaacctggaccacaggaagctgaaaactccccaagccaagctctttaccgtccccagcgaggccctggccattgcagtggctactgagtgggattcccagcaggataccatcaagtactacaccatgcacctggtaacaagttcacagtgtgaacctggaccctgagacccacccagggcttcgtagggtagaccctttaccaaattccgacaaggccctgggggctggtcctttgcctgtctggcccccagggattcacctcctctcaagtcactaacgtgctaaactctttccttgtctggcccggctacttgcagctctctctcctaggaacactgtgctggatggctggtttctcctttggtttcaggacagatgtcaccttcattgactgcccagctctcttattttctatgacagcagctggccatttgttttgtcagcacttaggcaatttataattgttttatgtttgcacatttattgtctgtctcttccactgcctggtaagcaacagaagggcaggagccatgtctgttttactcatcagtgtctggacagccactagcaggtaatttagttggtactcagtaaatattagttgaatataagatccactggaggcagatgggtgaggtgaggaagactccctatagaaccagccccctcgtccacaccaaagtggctcgcctaggcaccaaggctgcctggggaaggaagggcccagctacactcttaggtccagcctctgcagcttctaaactgtaaccttgggcaggttgctacccctttcgcagccccatattccccaccgattaaagatgagtgataatagtacccacctcacggagctgtggtcaggatgagatgagatgatgcaagaaagcccttggcatggtccccagcactgactgggcactcagtcaatacaggagtcagctgctatcatcccagccgctgctgtgctcaacctttgcaaacccaggtgggcctcctcccaacatcacagcctgctgaggtggttggcctggtccttgacaacctagtgaaattagggtgattagggctacaaacgaatagggtaacctaagcagcctattattgacaaggtaagtctggaaaaaaaaagatcttttttttttttttaaacagtctaactctgttgcccaggctgcagtgcaatggcataatctcggctcactgcaacctctgcctcctgggttcaagcgattctcccgtctcagcctcccaagcagctgggattacagacgtccaccaccatgccaggctaatttttgtatttttagtagagatggggttttaccatgttggccaggctggtcttgaactcctgacctcaggtgatctgcccacctcagcctcccaaagtgctgagattacaggcgtgagccaccacacttggctgaaaaaaataatcttgatcccgatttgcatgggctatttccctactttctaaggtgtaagggaggcagctggtaaaggtttccagtcagatttgagctccatcactaatacatgtcttattaactgtatttgacaatgtacttaacctgtctgggcctcagttttcacatcccagatggacataataatagtacctactccaaaaggttgttgtgaggattaaattaaatacactagagcctggtaataaaaggcatgtgaccatgggggaggttcactaatcctggggctgctgcaagcttccctcgagtcctgtgagcgtcaacacaaagcatttggcatggagcctggttgtggcacactctcagtagctgtgctgctgctccggtaatgcagacgcctctggtggagggctgtgctgtggtgctgtctgctatgtgtcagatgtggtgtcctcaggaaagcagggcttttgcctgagccccgcaggcagtgacagggtggtttttgcctttgattcagaccacattgtgcaacacatcattggacaacccaacccagagaaacaaggatcagctgatccgggcagccgtgaagtttctggacaccgacaccatctggtaatggacatttagatgggcattccccttggattgaggctatttttcctgatttgcccagatggttatcagtggaagaagaaaccctctccatttattgcaaggacaaggaaggtggcccacttgactttggcacttggctgctctgtagccccttaggaggaggactcctcgggctacaatggtgtcagaacatggccacccctcttctctagcccagaagctgctccttaggctgggagggtggttatgcagctcttgcaggtgccgtgaccacaggccccttaggcctaggggggcctgtgaccttaaacttctgcccaccgacactttctcaggtaaagcatccttggcactatggatgctgataactaggagtgtccttctccagttctgaattc

SEQ ID NO: 22663 - DNA, 247877 bp, Homo Sapiens
acttgaacctgaacctaccctgcctccaaacagctgtcacttaggggaaggctctagcacaggaggctgtggattgacccatgtgtgaactggaggaggaggaggaggttgagcttgagaacgatcaccactccaggaaatcacgcagatgaagggccctgtagccccctgaagaaaacactagcacaccgttgtgagaaagcacacatttggatttctgccaccaagagggaatccatggccaggaagagataagaaccaacaggaaggagaaggaacctctccatcagaaccctgagaaattcacataaggaaacagcatctgagcaaccaagaagacaaggcccctcagcccaggagaggctgaaaagagagtcctttatttctcccaccactctgcccaacagctgagggttgacatggggtgaagtctgaaagaatagcacatctacctgtcagtggagctcccagagtcttcctgctgggtgtgggtggagggtagagctttgactctaaaatactaattaagttcaaaatgaatacacacatagttggaacaaaactgctttagtaactaaaagagaaaggataacctgtttcccagtggaaaagagatgattgataagtgaaaaaaaaatgaaaacaatttcacactcacatttatctcatgacttgaaatgctctagtcagcacagtaatatctggatctctttgggtattttctattaaatgttccgcttattggcttaatccttcacttatatcatattgttttgtttagagtagtttagagtaagtttttatgtcataaaaaaactgatcttaatattccttttcaagaatgcagttgaaagttcctagatatttgttctctcttatgcatttcatcttgttcaaacaaatggcattctgactgtaactactttggaaagtttaacattttaggacattatatttttccacaaaagaaaaatccatctatttaggtcttattttaaaagtaaattttgcatgtttgtttgtttcttacataccttccactttctttttttttgagacaggatcttgctctgcagcctaggctggagtgcagtggtacaatcatggctcactgcagcacagacctcccaggctcaaatgatcctcccacttcagcctctaaagtagctgggattataggcatccaccatgcctgactaattttgttttttagagatggcgtctcactgtgttgcccaggctggtcttgaactcctggcctcaagcaattctcctgccttgaccttccaaagtgcagggattacaggtgtgagccactgcacctggccagatttctgcttttcttattaaatcaattgctaaatattgtatcatctgtgttgcattattactgaaatttttcttcatttagagaaatttattccatataaggaaaaattactaatttttaatatttgcttaatagccaacaatttttgttacttgttgatttttagcagtactatgaccaaagtggcacatgtacatgtttattttttaaattcctgaatagtacagaaaagtctgtattacaaatctggtttcttatttctctccaactttcaatccttgtccataaatatttacacttttaagtctggatcttctagcagtgagctccatatttctaaataatatgttttaactacttcttgcaacatacattttattcttttattttatttacttatttttttagatggagtctcacactgtcaccctggctggagtgcaatggcatgatctgggctcactgcaatctctgcctccggggttcaagcgattctcctgtctcagcctcccgagtagctgggattataggcatgtgccaccacatccagctaatttttgtacttttagtagagacggggtttctcctcgatggccaggtttgtctcgaactcctagccccaactgatccacccgccttggctgcccagagtgttgggattacaggcatgagccaacgtgcctggctgcaacatgaattataggtgttacctgttgactttcgttttgttttttaaatagacttaattttttaaagcaattttaggttcacggaaaaattaagcagaaagtagagagtttcccatatacttccaggcctcacatatccacaggctcccatgctatggacatcttccaccagagtgataacatttgttccactgatgaagctacattgacgtattattattacccacagtccatagattacattagggttctctagtggtgttgtacgttacatgggtctggacaaatatataatgacgtgtagccgccattacagtctcatacaggttgtttcactgccccaaaatcctctgtgctctgcccgttcactcctccctccccccagctcctgacaaccactgatcttgttactgtttccatggtgttgactattccaaaatgtcatatacttagagtcataacagtatatagcctttttagattggcgtctttcacttagcaataggcatttcagatttttccatgtgtttcatggcttgatacctcatgtcttttgagtgctaaataatattctgttgtctggatgtaccacagtttatttacctattgaaggacatcttggccacttccaagtttgggcaattatgaaggaagctgctataaattcatgcacattttgaactcatttgcttaaataagaaagagcataatttctggatcatatgcaaagaatatgtttagctttgtgagaaactgccagttttcttccaaaatggctgtaccattttgcattcccaccagcaaggaaggagaattcctgttgctccacaccctcactggcatttggtatcgtccgtgttttggatttttgccattctatctggtgtggagaggtcgctcattgttgtaatttgcaattccctagtgacatttgcatggagggtatcttttcatgtgcttatttgtcatttatgtacatttttaatacgtttcactttgggggtcatttagccttcacctggcaaaacaaacaaatgaaaatttacacataattctgtgaattaatttttaaaaacttcataaacctcacctttatccacttttattcttacttatatttacctagtcagacttttcagaactttttccaagttgtcagaacatatttaaaataataaaattaaaataggaggaatttttgcctgtcacctttgctcttctctcttttccctcatccactcccacaccttttcttctttagtttccttccccaaccattccaaacactcattatgcccaagcctctttggacacttcgatcaaaattttctcctctatatcatccggaggaaatgcaccgtttgctcagggacacttagctcacctgcttcccacgttttctctcggtctccacttgtgtctggactgagtgttgctgaccaccacagcatcaaagagcctgtgagaccactggatgcagtctgggggtcagtgacctcagaggaaataccttcagtgtcccacgggctctgcaggtcagtgcactcagagtgagcttcctcacactttgctggggaaagtgtccagtagcttcaataatctcatgaccaaaagactgaagagaggggagaagacatccgagttcacattttcaggcaatagtagctgacatttcctgaatgatccttgtgtgtcaggcaccttaggtccgttcatgacttaccacatgtttctgtatgacagcaccatggggaagcttctgtaattaattcctattggataggttgctgctgatggaagtggggtctccaaatcctctatcccagagtctgtgctgttctgcagactgaatatgctttctccccaccccttcctcaggctttggcaaaggagacctctgaaaaatggcacttagtatattattgacttttgttttttaattggcttttggactaatgaggtcagtataatgtgtgaaaccaaactagaaggcagtgctggtaagtttgttgagtctctgacaaatatttggattctgagcaattcaaacatccaggcaactttaaaaggtcttcttcctctgagactcatagtgacttatacaaataaaaataaaagattagtaataatagtagttcatcaaacactgcatttacttatattttctcaaatactattttcttttttttgaggcagagtcactctgttgcccaggctggattgcagtgatgcaatcttgactcactgcaacctctgcctcttgggttcaagcgattctcctgcctcaatctcctgagtagctgggattataggcatctgccaccaggcctggctaatttttgtatttttagtagagacagggtttcaccctgttgtccaggctggtcttgaactcctgtgatcacccacctcggcctcccaaagtgctcaagtgatcacccacctcggcctcccaaagtgctgggatttcaggtgtgagccaccatgcccagcttcgaatactattttctaccataccatttaaatgtcattcaaatttaatattttcaacaaattttgaaagaaggcaatcaggcaaatttcatctcagtcaaataatccctaaagttacacatgctgtggctgtacctttctcaactttgtttcccttcatccagttaagacttggttgtgcagagttaggggctccgcaggtgatgacatgatcaaaggccctgacccttgtcacaagagtactcactaagaataaaagtgtttgacatcctctcagcaactctgatgtgtaatcccaccagcaattagtgtttttctttctccgcgttgattacagatagtttgcttttccctgtatgactgcaaaggtgtgtatatttgaatgtatgtctgtatgttgtttgggttgcagggaaggaaggagtagaaaaaggaataagaggtggctgtgattggctggtcgctctgaatgcaaataactctatgcttttcacctttagtgaatatataaatgtctcaggataggagcgataataaataatgccaaagatcttccttagtggtcctgtggcttcattgaaggcatacattgaaatgtttctagccaggtgcagtggcttacacctgtaatcccagcactttgggaggccgaggcaggtggatcacaaggtcaggagttcaagaccagcctggccaagatggtgaaaccccaactctactaaaaatacaaaaaattagccgggcaaggtggcacgtgcctgtaattccagatactccagaggctgagacagagaattgcttaaacctggagaggcggaggttgcagtgagccgagatcgtgccactgcactccagcctgggtgacagagcgagactccgtctcaaaaaaaaaaaaagaaagaaagaaagaaagaaatgtttctgaacaggggaaaagccaaatgcaatgggcattcccgaaagactgaagaaagaatacgtgcaagttgattcttctggggtttccaggaaagttgggaaaagaaaatgaatcatttaaaaagtggagagctgatgcctggccctctgtacttgtttctctcagggaagaaaggcagcagaaagtagagcagtgtcccagtccacacgtgtccagggaagagaggcttctatttttaactgcagttacacaagactgttggcttttatgtttcagacgcagtgctgtgaaagaccatgtccttgtagttttcattatttcagaggtaaaatggaaagcaggagtaagagccccaatcattaagaacacggcttagctctctgcagatcacagactcagccaccaactcctgccctgtaaccatggagatgcccccacttcagtctgtacacaaccccacaagaggaaccacttactcgcttccttttctaatcagcatgaaataatatttttcataattattatctgaggcttttctatttcctcctctctatctactttgacaacataaaaatatattagggcctggtcgtggtggctcacacctgcaatcccatcactttaggaggctgaggtgggaggatcacttgagcccaggaggtcgaggctgcagtgagtcatgatcatgccaatgcactcagcctgggcaacagagtgagaccctgtctcaaaaatatatatatatacacatatgtattaggcattatgctgtacacaaagagcttattatctaatacacatgataatatctgtcactagatgtaagctttatagagataccaatttttttatccaataaccactaaccaaacaatgatcaaataaataaatggcaggttatatgtataccgatgtgtaaaggcaaatttatggccaatggttaaaatttactgaaaacaaatttcagctcgctataaaaaagaactagcaatcagagttttcccaaaaagaaacagacagctttaaggcataaaatattcctttctacaggaaatattcaaagaaaagtagaatgcccatttccagtgatgttgcagaattacaaaatgatatgattttgtgcaaaactaaaacatgtaagttttgtatgggggaaaatagcatcgaagaacagaacaaccaaacagcttgtaaaatgcatcgtgaataaaaaaagctacttccagcttaatggaaattggattttggatttgtatttgaagcatgtgtaggatttaaaatgagagagatggtaagagaatacatgccaggcaggataatcttatcaagggcaatgatcaagaaataacagagagaaaggtttaggaaattagaagtttccaaatatgactgaaagaaccaatttttattggaaaatgctgtgagataagagggaatcttggcttgagacaattgttagtgtaagaggactgcacacagcccagaactgggtttctttccagacaaagagaaaatggtatgagattatccatccttaccataaacaacattaaggaatatcttgaaattgtttttcagaaagagctaatattaacctaaatttaaactgttaaataacatcaaagatttactttacaagcacatttctaaatgtactgaaaaactatatttccataataattgattcaatggacagataaatttccttttccctgagtagttctatcatcaactaatagcccttattgcaggaaacgaaaaatctaaacacttttccgaaagtgtcgcgattccccgatcactttccagcgtgaattttcttaggggtgaggatgggaacactaatagtttctctgcactcaggaacctcataaaggacaaactttcaaatcaaataatacagaccaaataaataaaacagagctacatcttgctttgctttacacttcgttctcttccttgtctgtctgcaaaaacctttgcatgattttcattgaaaataactcctgaattgatgcgagattttacttaccctgggacctacccaggcctggtttagatatgttcccatagtcttccctgctcttccgggtactgagttaccataaggataaaccaggcagacagttcttagacattagggctaatttctaatttacccccctgtgtctttcttttatcatcacaaacatgtttggtgtctaatttggtttactcttaggaaaggatggtttggagtacataaaacagaatggttcctcaggcagcaatatgctacagttttagagatcttgtagctctatttttctattaattgatgcaggttttgagaatcaacaagcacattaaaaatagacatcaacactatagtaaaattaaaacagttattctgtcttttgttgttgtttccacattattcagaaagagaaaagtactctttaaaattagaaatggagaacaacaaggaagagaaatctattttgttgaaaaacagcttttggtaatattattcagtgaaagatgaagtgacagacgtggaaacttctagtcaaagtttgcagcttttatttgcattgaatatctatccaagatgaatcatcctagaaaagcagccagtggacttggaataatctcgctcaccatggtttctgccaaggaaggatttctttggcgcagaatgttgggtatttatttggggtcttgaatgggtgaaagagacaaagaacaatttacgagaaagaaaggagaagaaggaatggatccatggacagaaaagatttgtcctcaagggtacatccaagatttgctttaatctgtcatataatggaaatttgaaacagttattagcacaggttcacagcttctcaaaactaaaaaccattgtggaaaagaggctaagcacaaagatgtaagcactaaatgagtataactgctttgcagacagtttcatgtcagtggacatgtgccatttttcttctttttttttttttttctgcccagtgcagctgccacatattattcaatgcacaactttacagggcatcattcacatcttagtaagacatggagaaagacaatgctgagataaagaaaagcagatttccgagagcatcatcagagcctacaaattcagctctgcctggagctgcaaaagtcaaaatattctttttggggatcaagccagcatgaattgagattctgtcatttacagccaatggattcataattctcatagccaaaagggagagggatacttttggttctctgctattttatgagctgaatttatggtccacagaagcattttctactcaaaataactagagttatgtaaagacaaataatcattggtctactctcattatgggaaataagagccataataaccctatgtgtgttttatgaatttcaaatgggaaaaattttgaaaactactaaaaattcataactctacattataaacataagaactcttactttttctatttttactttttaatttccacttttgttactatttttacttattttccttgtttacatttttgcacatgaggaaatcatattgtaagaataattttatgaaattttattctcatttttagaattaaaaatgccttggatttatagtttgaattggctactatttcacaccgtagatatacaatactttataattttcctgattggggatatttttattatttatttccaatttttattattttaaatagcattgtggtaaacatctttaaatatacattttattttatttatatatatatttttattatactttaagttctagggtacatgtgcacacgtgcaggtttgttacatatgtgtacatgtgccatgttgttgtgatgcacccattaactcatcatttacattaggtatatctcctaatgctatccctcccccctccccccaccccacaacaggccgtggtgtgtgaacttccccttcctgtgtccaagtgttctcattgttcaattcccacctatgagtgagaacatgcggtctttgggttttttgtccttgtgatagtttgctgagaatgatggtttccagcttcatccatgctacaaaggacatgaactcatcattttttatggctgcatagtattccatggtgtatatgtgccacattttcttaatccagtctatcattgacggacatttgggttggttccaagtctttgctattgtgaatagtgccacaataaacatacgtgtgcatgtgtctttatagcagcatgatttataatcctttgggtacctacccagtaataggatggctgggtcaaatggtgttgctagttctagatccctgaggagttgccacactgtcttccacaatggttgaactagtttacagtcccaccaacagtgtaaaagtgttcctatttctccacatcctctccagcatctattgtttcctgactttttaatgatcgccattctaactggtgtgagatggcatctcattgtggttttcatttgcatttctctgatggccagtgatgattagcatttaattttcatgtgtctgttggctgcatgaatgtcttcttttgagaagtgtctgttcatatccttcgcccactttttgatggggttctttgtttttttcttgtaaatttgtttgagttctttgtagattctggatattagccctttgtcagatgagtagattgcaaaaattttctccaattctgtaggttgcctgttcactctgatggtagtttcttttgctgtgcagaagctcttgagtttaattagatcccatttgtcaattttggcttttgttgtcattgcttttggtgttttagacatgaagtccttgctcatgcctatgtcctgaatagtattgcctaggttttcttctagggtttttatgattttaggtctaacatttaagtctttaatccatcttgaattaatttttgtataaggtgtaaggaagggatccagtttcagctttctacatatggctagccagttttcccagcaccatttattaaatagggaatcatttccccattgcttgtttttgtcaggtttgtcaaagatcagatggttgtagatgtgtggtattatttctgagggctctgttctgttcaattggtctatatctctgttttggtaccagtaccatgctgttttggttactgtagccttgtagtatagtttgaatacaggtagaatgatgcctccagctttgttcttttggtttaggattgacttggcaatgtgggctcttttttggttccatatgaactttaaagtagagttttccaattctgtgaagaaagtcattggtagcttgatggagatggcattaaatctataaattaccttgggcagtatggccattttcatgatattgattattcctatccatgagcatggaatgttcttccatttgtttgtatcctcttttatttccttgagcagtggtttgtagttctccttgcagaggtccttcacatcccttataagttggattcctaggtattttattctctttgaagcaattgtgaatgggagttcactcatgatttggttctctgtttgtctgttattggtgtataggaatgcttgtgatttttgcacattgattttgtatcctgagactttgctgaagttgcttatgagcttaaggagattttgggctgagacaatggggttttctagatatacaatcatgtcatctgcaaacagggacaatttgactttcccttttcctaattgaataccctttatttctttctcctgcctgattgtcctggccagaacttccaacactatgttgaataggaatggtgagagagggcatccctgtcttgtgccagttttcaaagggaatgcttccagtttttgcccattcagtatgatattggctgtgggtttgtcatagatagctcttattattttgagatatgtcccattgatacctaatttattgagagtttttagcatgaagggttgttgaattttgtcaaaggccttttcggcatctattgaggtagtcattggtttttgtctttggttctgtttatatgttggattatgtttaatgatttgcgtatattgaaccagccttgcatcccagggatgaagcccacttgatcatggtgcataagctttcggatgtgctgctggattcggtttgccagtattttattgaggatttttgcattgatgttcatcagggatattggactaagattctcttttttttgttgtgtctctgccaggctttggtatcaggatgatgctggcctcataaaatgagttagtgaggattccctctttttctatttattggaatagcttcagaaggaatggtacaagttcctccttgtacctctggtagaattcggctgtgaatcatctcgtcctggacttttttcggttggtaagctattaattattgcctcaatttcggagcctgttattggtctattcagggattcaacttcttcctggtttagtcttgggagggtgtatgtgtcgaggaatttaaccatttcttctagattttctagtttatttgcgtagaggtgtttataatattctctgatggtagtttgtatttctgtgggatcggtggtgagatcccctttatcattttttattgcgtctatttgattcttctctcttttcttctttattagtcttgctagtggtctatccattttgttgatcttttcaaaaaaccagctcctggattcgttcattttttgaagggttttttgtgtctctatctccttcagttctgctctgatcttagttacttcttgccttctgctagcttttgaatgtgttttcccttgcttctctagttcttttaattgtgatgtcagggtgtcaattttaaatctttcctgctttctcttgtgggcatttagtgctataaatttccctctacacactgctttaaatgtgtcccagagattctggtatgttgtgtctttgttctcgttggtttcaaagaacatctttatttctgccttcatttcattatgtacccagtagtcattcaggagcaggttgttcagtttccatgtagctgagcagtttggaatgagtttcttaatcctgagttctagtttgattgctctgtggcctaagagaaagtttgttataatttctgttcttttacatttgctgaggagtgctttacttccaactatgtggtcaattttggaataagtgcaatgtgttgctgagaagaatgtatattctgttgatttggggtggagagttctgtagatatcaattaggtctgcttggtgcagagctgaattcagttcctggatatcattgttaactttctgtctcattgatctgtctattgttgacagtggggtgttaaagtctcccattattattgtgtgggagtctaagtctctttgtaggtctctaaggacttgctttatgaatctgggtgctcctgtattgggtgcatatatatttaggataggagaattgatccctttaccattatgtaatggccatctttgtctcttttgatctttgttggtttaaagtctgttttatcggagactaggattgcaacccctgcctttttttgttttccatttacttggtagatcttcctccatccctttattttgagcctatgtgtgtctctgcacgtgacatgggtttcctgaatacagcatactgatgggtcttgtctctttgtccaatttggcagtctatgtcttttaattggagcatttagcccatttacatttaaggttaatattgttatgtgtgaatttgatcctgtcattatgatgttagctggttattttgctcgttagttgatgcagtttcttcctagcatcaatggtctttacaatttggcatgtttttgccacggctggtgctggttgttcctttccctgtttagtgcttccttcaggagctcttttagggcaggcctggtggtgacaaaatctttcagcatttgcttgtctgtaaaggattttatttctccttcacttatgaagcttagtttggctgaatatgaaattctgggttgaaaattcttttctttaagaatgttgaatattggcccctactctcttctggcttgtagagtttctgccgagagatccactgttagtctgatgggcttccctctgtgggtaacccgacctttttctctggctgcccttaacattttttccttcatttcaactttggtgaatctgacagttatgtgtcttgtccactccagaccctgtttgcctgggtatcagcagcagaggctgcagaacagtgaatattgctgaacagcaaatgttgctgcctgatcattcctctggaagtttcatctcagagggatacctggccgtgtgaggtgtcagtctgcccctactggggtttgcctcccagttaggctacttggggtcagggacccacttgaggaggcagtctgtccattctcagatctcaaactctgtgctgggagaaccactattctcttcaaagctgtcagacagggacatttaagtctgcagaggtttctgctgccttttgttcagctaggccctgcctcccaaggtggagtctacagaggcaggcaggcctccttgaccttcggtgggctccacccagttcgagcttcccggctactttgtttacctactcaagcctcagcaatggtgggtgcccttcccccagcctcgctgccgccttgcagttccatctcagactgctgtgctggcaatgagcgaggctccgtgggtgtgggtccctccaagccaggcacaggatataacctcctggtatgccctttgctaagaccattggaaaagtgcagtattagggtggaagtgtcccgattttccaggtgccatctgacacagctttgcttggctaggaaagggaatttgctgacctcttgcacttcccggatgaggcgatgcctcgccctgcttcacctcatgctcagtgcgctgcacctactgtcctgcacccactgtccaacaagccccagtgagatgaacccagtacctcagctggaaatgcagaaatcacccatcttccgcgtcgctcatgctgggatctgtagactggagctgttcctatttggccatcttggatccacccctaaatatacattttaatttaactttttatcgtttcattaagacagcatcctcgaactggaattagtggttcaatgggcaaaacagctttatagcctgttggttccttgtctgtcttaatagcataacaccttttaaaagctttctaaattccttatctctactccctaacccctttcttactcaaaacccagtccaggcagatttttatccctatccttgtatcagaatcactttgttaaggtcacaatgggtttcatagcctcaaatccaatgatccattaccatgttttatcttactgaatttctcagaataatttgacaatttggttattctctccttgaaacattatctttgcttgagtttggggattccacactttcctggtttgctttcaacctcacaagccactccttttctagctcaccttcctcttgctgacctctagatactgtgttgtctcaggactcagtcctcaaacatatatgccgtctacatgcactctctaagtgatttcatccaggaatatggctttaattaccatccatacattgatgactcccaggtttatacctccatccaacccctctctgttgaaagccaggctcatatatactataatctatataacatctttgccagatgtctgtctggcatctaaaatctaagatatccacaacataccttattccctcccttacgctcatccctcactcttccccatctcaagaaaacagtgatataattcacccactcgctatagccaaaaatactggaatcttctttaattcttctctttcccccataccccacattgtcaacaaactggccacataagatgtgttttctgtcagaaaaaaaagcctgacttcattttttaattcaaataagaatgttacatgatgggttccaatgacaacccagtcatttcataattctaattctaaagtaggtagatgaatatggtaaggaaccttgcattgtggctgtcgccagttgaaatatattcctgttttgcaatatttcttgcttagcttttaagggctctcccgcagattccagaagctaataaattgtctctttatttggcagcttgggaattttttttttagcaccctggaccaatgcaccattccggatggttgagatatatactttttctttaaggggtaggaggtaagggtgatgttggaaagagaaatgggaaagaagcagcagcttaacatttggaccctgaagcatgttctagagcaggctggttttaagaaagtcctcatttgcctcaaggtacgtgaccccagtttaatgactataggcctaaatgggacaggatcacaatcacatttgtcaccagcagactcatatctaggaggcatacaagttattcctgttagaacagtgacttactggaaagtcatttcccaccactgatttgagtcgctgttattatcgtacatgaatttccatatacaattaggccatattacagatttgctattccatttaactaacctgtctgcctacccttaattttcacttaagaattttctttctctttcttttcacttctgtgcaatagaaaatatactcttttcttctacattttcttctgttttttttgttttggcataagaatgacaggaattttttaaatgtttaattgtagccaatcctttgctagtggtctttgtcctcttttaggttttctgatgtacagtcattttatctacttacatgcagatgatgttttatctcttcctttccaattcttatgcttcttattgtttctctgggctgactgcattagcaagtagcttcaacacaatcttagatagcagtagtggtaatgaacatctttttccttcacctactttaataggaaagcctctagcactttcccataagttggtgctggtttgggattacggtgtatgcaagttttatgtgatatgttaaagaattagttattagtttttatttttcaatgttttaacatgaatctgtgttgtattttgtcaaattccttttctgcatcaataaagataatcatatgattttttttcttggctcttgtatcagttattaagctactaactcttacctacaattgcttagctcctatacctcgcttctagagtagtaactgctgatgtcaatcatacactggcccctagagctagttgactttttaggtgtgtttttcttctctctccaactggataattagcatattctattttgtacattttattaaatgtctccacagggttaagtgaatttgttgaggtagtgacactcaacatttattgtttacctgccacaacccctgtccatcattgctcagtaaaatcgttaatcatctatagctagacatatacctgctagtacctacctagaatgttgaaatcacatacctgagataagagagaagaaaaattccaaggagaactctcatgtaaatgctacttcctccaagcatctaaaacagctcctctattctttctaggaaaaaaaatcccttctttgaggacattcctggtaagtatcctcataaatagaaaaaaaattttacaaagagaactaaagttttgctagcatttctgtggtttcagacttaatgtgatgtggggatgctctgattgggaaaaagaaagatcataaggtttctagggaagtgtaccagtttacaaatagccagattctccagtgaccacctcatgtgtctattgtttttttctcaagcagaaatgtgaaaacaggagaaggtagagtccagtcttacccaaaccctgcatgtccaggagaaagctaactctagtctaagctacaaaaaacgaaaaaaaaaaaaattctccttgttttacataatttcatacacaaaaaagaatggaagagtaatatccacaattaacatcaaagatcctcttattcttcatagactcagtgtagaggctcagacacttatgtcatgaccacagaaagaaatgaaggaagaaaagaatgaggatagatttgctagggccagggctttacccaagaaatatagctgagaaaatgtgggagggtaataggtaggcacctatgctccacaggatgagacctggatgcaaagaacagatgagagctttcttccctatcctctcctcatcttgagtccctagtcattgctgcaagtacaggaaaccataaaacagagtttcagaaaactaatatgtaaaacatgagaaattaccagtgtgcacaggtgcccagagctaaatataaagcacttggatatttgcaaaagcactagcatgctcagagttagccagttactagactgctttctcacacctgaaaacatcctaaaagaaaggatactacattttcctcctttgtctttttaacgagaatttggaaaaggtctaactcttttaacttatttaaagctgctgagattgagacatataatacagctctggtagaaaaataatcaattaagggaaataatcagatcttctctcaacctattcctacccccctcagaatgtactacagtgccatagaggcaaaaagcctgcataattctttaaaggtgaggggagtgagggagtttcaggtgtaaaggattttcagacagtcataactggagaaactttccttttaacactgtttgctttctttcttttttgtttgctcctcacctctctgtatgttccgtctacctttcatttcaacataacgagttactttatattaagggggaaatgaaaaaacaatttttttgagttcagaccacctgggggcagtgcttcctttgacagaggcactgccagaaactagaacaaggggaagggaacagcaggaggagggcattcaatgatgtgtgtgatgtaacagtgaggttttgattatccgtaaaaacaatgaagattccccaaaggctacccaaccaacagaaccagaagactctagaacagtgaactaggcccagtgaacacggccaaatctaggtctccaaactgaatccacagaggctccaggaaaaggaaagaatggaaactccactgagcactctgctgctgctcctctgtgtgcagctgacctgtgagtcaggcgagtcatgaggaggggaggaatcaagtaggggcggccagggcattgaaatttagaaagatcccggggacaatcttgggtctagtctcaggaatgtaaaacaaataatgaaactgatgaacaaacacactatatatatgaaaatgtttcattcctcctaagcagggtcaaatggacaactgccagtggaacagaatgctccttccctgaaagtcaaggaaggtgacagcgtcacactgaactgcagttacagagacagcccttcagatttcttcagtggttcaggcaggatcctgaggaaggcctcatttccctgatacaaatgctatcaactgtgagagagaagatcagtggaagattcacagccaggcttaaaaaaggagaccagcacatttccctgcacatacaggattcccagctccatgactcaaccacattcttctgcgcagcaagcacacagtgcccacagtcacctgcacccggtacctaaagcttgctgaggggcctgggcacacctccttttataagggccctggggcactgactataactctgctgcatacaaagggaaatatgagggactgttttataacataatatcaaacatttcatttgaagaccatgtgaggaaggatagtgttttcaaataccatctaaagtactttgtttctcagtgtgaggcccttcctttgtgaaaactagcccaaaaactagaggctaaatatcaaaaaggagagagcactaaagaacaaagaaagaacagggtaaaattcttgtctttgagcttctttgtagacttttacaaagatatagaaaatacaaaatcttgaaagccatgaccatcaaattcagtagtgaaaggaaaaatattttgacatgccaaaaagattggcttagaagatcaagtaccaaaatctgagggaaaattgtacaaagcatttaaaggaaaagagaacacaacatggtagaaaagctgtcttctccttaaaagggataaaatgccaaccagctagctagaaaggaagtcaatgatgtgaggagaggtcataaacagtgagtccagcatcctgctcttttctagggtcagagctctgagcaggtagggtgggaggagggtgagtcacatttagcaatgactctgaactgaaggaacagtgaattttggaaaaaactgttttgatcattgtgtcttatatcaatactcacaagaaaacgcccattacagaggaagcattcaacaaccatgtggacaagacggtcggtccaaagcatgtcagccagccagagaatgtctgtgcttgtcaatttcttgaacaatagacccatgaatagattagctgaggtgacagattgagtttctttataagcccagaagcatgggttttctcccaccaagacagattcagctacttctgctgctgtcacaggacttttccttagttcaaagacagggttcttttcccatgggcacgaaaattcaggctcgcaaacaatttgaatggtgagtaagacacggttttattgggtgaagaggaagaaaagggggaaacagggactcttacaaggccagagtccctgctagagcacttcccaccccgcagttcgaatcccaggttccacacaggaagaggaggagcctggctcctccccactgcaaaggatgccaacttctgcggctccaccccagtgcacaggctgcttggaatttctctagggaccccctcccacctggctgtctcactaccaaatgtccaccctgtcagcagtaaatacaacactgagccttcgatgtggaatcatccttcaaaggaaccagccacacactagttggcaagttgattacattggaccacttccaacctggaggtattaggaattttttttcttcttaatacatattctgggtgtgaatctgtggtctcctccaaagtgccacacatagttgcatgaactgatggctcagagtgtctcattgatcattctgatcatcaaaggatttcacatcccttgcatcaacagacccactttatatcaagggcgtgtgacagtagtcatgtcatatagcatatagcttcatcatacagcattagccatgaaccactagcctgatagaactttggaatgaccacttaagggcccagctaaagcaccagcttagggacagcaccctgaggggctgaaaagctattctttgagatagtgttgtgtccctgttacataaaatacatggacctgggtagcaagggatggaagtaggactatcaccccatcaaccaccactttcagtaacccacttttgtgcttcctgttcttataactataggttctgctggactagggattctgtttccctttgagggggaaaagggaggatgctgcttctacgagggaaataggtttttaccaaacccaagataatatatactacctcataatttggggatcttcatgccagtcctggaggccaagaaaggagttactactgtcatggacaagttgatcctgattatcatgaagctaaaccccatagcggaactggggatatatgtctacaactcagggaattcactgtgatgacttttagcactttcatgtcagtgattatcgtaaataggcaactgtagcaactacagcctgacaagagcagactaaccaggggcttatacccctcggtgatgaaggtctaggttacctccctggaaaagaaatctagagcagtagaaaaaaatgctagccgaaggtggggagaatcaagaataagtagtatagaaggtagatggaggagataataaatatgagttgcagtcatgcaactaactataacaaacgtaacttgtcccagtaaccctcttgttgtcaaaacaacatcaacaacaaaaactagtgatctatatgaatttaacacacagcacaagtggatctgagcaaggcaaggagtgaactgtatagatactgttggttccctacctatatctcctaggcagtcacgccaacatgctggacaccactcgctgaaaatcccagcaaccctgaagatgactttgactttctggccatgaatgtggaggctgtggaggacaagccagaaatgcaaaagagttaatgccccaaaagcagttcttaatcagtgatagacagggagtttaggcatgattactccagtttcttcatgactcatttggcatagctccaaagagtatgctatgctgtctcttagagttattgtgacaggtagttagacaggcatgaatggggcacaagagagctctcccctccacccaccaggagtcatcaggcgattgttcggcagttatcacattacctctctaaaaatgataattggcagcaaattatcactggcaacttccccaacagataaagacacttaagattggtaatcagcttccaataaaatctcaggaattggtgagtgaacccagcatgtacattaagagacaaaacagcagagtatgaccttctgtgggcactccaccagaaaaaggaagaaagcctcagatgtgcatgagtacaacttcctaaacacactgctcatgcccacgtcccaagcaggaaggagggcactgcacatgcgggcagcccatcctaagggaagaatcatgggaaaggggcacaagatgctggaggtaggtcagtgtataaaatcttaggattaaggttaaaggctgcacttgtccttccagttgtccgcttgggtctcttccaagtgtactttcctttctctcctgctctaaagctttttaataaaattccactcctgttctgaaatttgccttggtctttcattctgccttatttccctcagtcaaattctttctgctaaagagacaagaattgaggttgctgcagacccatatggattcaccaccagtaactcagaaccttctacctctaacattatccagctgcagaaagctgcaattgcccatcgtggtaactgccttgatggcacattctgtattggcttccttccttccctgatttacctcttacccatgttttgccaacaaaaaagagttaaactctgtaaaatagttaaagaggttgattctgagccaaatatgagtgaccatggcccatgacacagccctcaggaggttccgagaacatgtgcccaaggtggtcgcagtgcagcttggcttatacattttagggaggcatgggacttcaatcaaatacatttaaaaaatacattggtttgatccaggaaggtgggacaactcaaagcaaggggcaagggggtcagtgggagtgaggagcttccagcttataagtagatttaatatttttctggttgacaattggttgagtttatctaaagacctggaattaataggaaacgtctgtattgcgataagaggttataaagaccagagtttgatcaggcagatgaagcttccaagtagcaggtttcagagagaatggattgtaaatgcttcttatcagacttcaggtctgtgttgatgttaatgccagagaggtatgatgaagcatgtctgacccccacttcccattctggcctgaaccaatctctcaagttgaattttaagagagccctggccaagaaggaagtccactcagatggttgcggggggctggggggccttagaattttatttttgatctacagtttcctagaatcacctataataaactatttacacacaaattattgtgtcgaagctgacttttagggatccaaaaccaagatacaggaattcaaatcatgagacaagggtgaagattatccagaagaaatgttggtgccccttctcttattgctaccaagctgagctttgcagcacaagggattttagcagtctcattcaggatgggccccagtgcttacaaactccttaagcatctctctgagaggggacactcagccacctacctctgtgacagagaactcatgctcctcacacagcacccagtacataacagggcccccattcataatgcccagtttggggaccccaactcaggaattacataaggatccctgatgctccctctggaaatgcaaaattctaaagaatcagagtaaggtatttaaaaagagtttttttcacaatattttttcaaaatggaatgaaaatgataagagcaattcttgatataaatataaattaagctgaggcaatttagtgctgatgagaacttctgcaatagttatttcagagcttcttgatatagcataaacaaggtggttttgtttatttgtttgtttgcgtttgttttttgagatggagtttcactcttgtcgcccaggctggagtgtggtggcacaaactcagctcactgcaacctttgcctctcaggttcaagcgattctctgacctcagcctcctaagtagctgggattacaggcatgtactaccatgcccagctaatttttgtatttttaatagagatggagtttaaccatgttgcccgggatggtctcgaactcctgacctcaagtgatctgcccacctcggcctcccaaagtgctgggattacaggtgtgagccaccatgcctggccaacaagattatttttttaatccatgtaaaatgtgaacacaattacacactacatattctgcttttacttatctctgaatttagtcgatgctcttttcagccacaagcatatatcttttttctcattctttattttgagaaattataaaaatgtaaaaaaattgaatataaataggcatattcttatcactcaaaattaagtgtccttatttcataagatttgctttgtaattttttttaataagaagaaaaataaaatcacagtttgccatttgttgtgaatggagtcagaggcttctgctcaccattctggatcacgctctcctctccaagattaggtcgtattaaaaacaaatttgccagctccattttctctttatttttcttctaggctaactaaaagcactccagaaacattttttattttcatttgaaattataaccagaggcctattttctgagagaccaaaaagtattcagaaatgtttccctccttgaaacctagtcacccacccacctatcatagcatttcctgccctgaaggagaattctcaccaagcacagaggagaacccatcagagcaggagacttttcactctgcaggggagcgctgtcagcatgacacgagttagcttgctgtgggcagtcgtggtctccacctgtcttggtaaggaagatgtggttctttctttataaaggcatctaatggggctgtgaagcaggagggattaacagaacagcaactgcattgcctcttagagcccagctacctggaggcagaaatatgctgcctgaggctagaatcacaaagaaaggtgtgtgggaatggggaatgggaatcagcttgtgagtctgtttctcactcacacgtgatatcccagtgaagtcctttctctcctattttccacagaatccggcatggcccagacagtcactcagtctcaaccagagatgtctgtgcaggaggcagagactgtgaccctgagttgcacatatgacaccagtgagaataattattatttgttctggtacaagcagcctcccagcaggcagatgattctcgttattcgccaagaagcttataagcaacagaatgcaacggagaatcgtttctctgtgaacttccagaaagcagccaaatccttcagtctcaagatctcagactcacagctgggggacactgcgatgtatttctgtgctttcatgaagcacacaatgagatgagcagcagggagaggcttacagaaacctcagacctcagcatctgtgcaaaggtcacagggtgagagggaagtggtagggtaataggtatagaaaatcattgacttctcttggaaatgaaagcttctcctatttcttctcctgtaagaaactcagagagatggctgtctgcaagcttcaatccttaaagttacataaagataatgacgtgtgcagtgcattccagttttacaaggtgccttcactaaggtacttattacaggtcagatttcctaagcattttctctgtccagaaaatttttataatttgcctgggcattcttacctccaggaattttaaaccttttccatttgttaattgttgcttgtccttttatttgtccatctggtccaaaactgcatctcctccgaataaggtacccattttagaacacaacaggtgtgacaacggtggcataaccacgaaggggacttgctgggcccaccagactcaagagatgacctaggtccactgcagtagaacctagaagaatgatgaaaaggctttaaaatgctccgctgaagggccagctcgtgggcaacacctcagtggttggaatgctatgcttcagaaaatgataatattcgttaaaccactggctgattcatggtgtcgtggcaaaagtttagaaaccaagaaatagacatagaatagagtcttctcctatcactccctataagtcattttcagaattcgtgtttccctttcccacaaccctaggttctgctagattagaggtcctagttcccaaagaaggatgctcccttcggggattcagtaacctgcagctatggctgccacttttaggtcactctgaactctctgtgccaatagcccagcaggcaaagagaggagctattagaccagaaggggtcattgaccctgactgtcatggagcaccaggttgttgtgacacaaggagggtgaggaggaatgtggctataatgtaagtatttcacattggtgtctcctgatgtttccgtgcccaatacaaacagcaagcggcagttcttgtagcagcaaggcctgaaaagggcaacgtgaccaagaactgagactcttcagcaatgaagttttcaagaacagaagctcatgtcatgcaaccttcctgtattaagggcgttgaagagattgcagtcagaggcaaccttgaagacacagtgacacagtggaaataatatagggcaagcatgcatctgagtagtgcaaagaaaggactgtaactgatatatgcgccctgttgccccatccgaatgtctgtctgattttagctggagttatagtagacaatcacactcacgtcatgctggtaacatccagcgttaagcacactctgtgttttgttatgttatgttttgttttgttttgttgctttctatcccaaagtcttctctaatgtctcaggagatcccttagtttaagggcaagcacagcctgaaattatagggaaactaccacccctgttggcaaacaccaaccaatggggaaaaagagccagggaataaacgcactagctttgcgtcccttaaatagacaattctgagcggcaacctgtgtgcttcttgggagatcctaccagaaccgagtcccacttgagtcagttattgctcgacccactttcttcttttataacttatttttatagatcaagggagtacaagtgccacttttgatacatggatatattgtgtagtggtgaagtatgggttttcagtgtaaccatcacctgaatagtgtacattgtactcattaggtacttttcattcctcattctcctcccacactcccaccttttcaagtctcaatgtctgttatctttgtccatgtctatgcattatttagctcccatttataagtaagaaatgtagtatttgaatttctgtttctgagttacttcacttaagataatggcctccagttccatccatgttgctataaaagacatgagtttattctttttatggctgagtagtattccatggtgtgtgtgtgtgacattttctttatttaatcatccatccattgatggacacttaggttgattccatatcttttctattgtgaatagtgctgtgataaacataacagtgaagttatatttttgatataataatttctttttgtgggggtagatacccagtagtgagatgctgggttgaagagtagttctatttttagttctttgagaaatccctatactgttttccacacaggttgtactgatttacattcccaccaacagtgtatatgtgttaccaaacatctgttgttttctgacttcttattaatagccattctaactgatgtgagatggtatctcattgtgcttttaatttgcatttatctgatgattagtcgtgttgagcattttctcatgtttgctgaccatttgtacgtcttctttgagaaatgtctgttcatgtcctttgcacacttttcaatgggcttatttgtttcttgcttgttgagttgtgtgagttccttgtagattctggatattagtcctttgttggatgcatggtttgcaaatgttttctctcattctgtaggttgtctctttactctcttgattatatattgtgtggtacagaagctatttagtttaattaagtcccattagtctattttttgtttcgttgcatttgttttaagatctcagtcataaattctttgcctaagccaagatccagaagagtttttcccaggttttcttacagaatttttatagtttcaggttttatatttaagtctttaatccatcttgactttatagtaagagaaatggatccagtttcattcttctgtgtatggctaactaattttcccagcactatttattgaatagggtgtcctttccccagtgtatgtctttgtctactttgtcaaagatcagttagttgtaggtatgtggctttatttctgggttccatattctgttccattgatctgtgtgtctatttttcatacaagtaccatgctatattgatactatagccttgtagtatcatttgaagtcaggtgatatgatgcatcaagatttttctctttgcttaggattgctttggcattcaggctgtttttttgtttcatattgattttagcattttttcctaattctgtgaaaagtaatattggtattttgataggcattgcattgaatctacatattgctttgggcaatatggtcattttaataatattgctttttccagtttataagcatgagaggttttttcatttatttgggttatccacaatttctttcatcagtgttttgtagttttcctagtagagatcgtttacctttttgtttaagtgtatttctaggtattattttgtggctattataaatgggattatttattttgtggctattataaatttagtttgtagcttggttgttactgatgtatagaaatattactgatttcatacattgattttgtatcttgaaactttactgaattcacttatcaaatctgggagtcttttggaggagccttgagggttttccaggtataagacatatcatcagcaaacagatagttggactttttcttttccagtttggatgccttttatttctttctcttaccaattgctctggctaggacttctagcactattttgaataaaagtggtgagagtgggtatcctgctttacccattttctcactcctgcttcctgagatcacttcctaaataaactacctgcacccaaggtagtttcaggctctgtcttggggggaaatcaaactaatacagggaatctttggaaatccaaagattctttgaaaatttaacaaagaaagaacagaggagagttcaaggtgaaccttactgggctaagctaataaaggtaagtgtgtacttgagtgagaaattgtaaaaaaaagatgatgaggcagatcgcatttactaaactccaatctctgcagatatgtgattacgtcttttcagtgttcaaaaactttactttccaagtttaagctctttcaactgtctctcatttccccttcccaaatcttctgaccctttactatttaaacttcattcctagttattcccaaaatacgtctctcttctagtcagtttattccccttactggctcataaggacttaaagctcattgctggctctagcatttctctactggttgctccacccacccaaatttcccttttgtgtatatttcagactgcttaaaccatattaatcttataatgaccaccagaaatctctcttccctctaagatttcttctctaataatcaaacaatcctttaattccttctcttccaaatgtcatacagtaccaactgtggaccaaacaatccgactcttactgacataccttcctaagacatttgctgttgtttcaaggtactcatctttcctccccaaatacattatattctctatgtagatagagtttgccttgtacccttcacaattcctcactgctcttagcacagtactaagcacataataagtgctgataaggcacaaatatgcttaaggtttaaattataatcatgctatatttctgaaagaatatgaaggaaaagaaacaggtttctctgaggaggtaagatgtgatagaaggtagaatttaagaaagcagtgataaaggaaaggacagatacatttcaaacatccaagtcttttgatttagtggaaacataaatctgaaactggtaaaaagattacttttagaatacatttcttactaaaccaagttctttccatacagaaaatcctagaaactgcctctgtaattatctctttgatctgaagagggcactgtttgctcctgttgatagcagttacttacaaaaaaccgatctcattttgaagaatccgctattcctaatacatacaaaataactagaacaaatcctatgttatccgtagagtctaggtcagatttccacattctggaatcaagttttccaccaattaaaaaggtcaaaccatggaggagcttttaggaactgtatttgtgatctggtggctttggcctgggtgagagctgagtgaattcatttcatcagggacacagaggactcagaaggttctgagaactagtctctatattttacagaagggattcaaagaataaataaaacatttaatttaccctttatttaatttacccttaattcatcttttttaagaaaatttgctatcaaatgaaggaagaggaatgctcttctgaccatctgtccagagagacacaaccaatctctgttctccagagagacagagccaataggatgaatatatagatatatgagaggggatttattagaagaattggctcatgcaattatggaggctgaggagtcccatgacagactgtctgcaagctggagaacctgggatgctggtagtagtgtgactagtccaaatccaaaagcctgagaacccagggggccactggcataaatcctacagtccataggccagagatcccagagttcttgtgtctaagggcaagagaaaaagagtgtatcccagctccaggcaagagaaagaccaagttgcttttcctaggtttctgttctatccaggcctctagcagattggatgcccacactgaagatggatcttccccatgtattccactaagactcacaagccaatgtcctctagaaacaccctcataaacacacccaaaaataatgctttaccagttctctaggtattccttaattccgtcaagttgacgcctaaaattaactatcacaccatccatgaaggaaagatgttttgtcatctactataattatttgaacaatgtttcagatccatgggacagaatgaaaaagatctagaataaatctgatgtctttgtttctgttcttgttaactagggttttgtagtgcaggggaagataagcagcctccttcagtgctagtaccagctccctctccctgaaccacaagaccacccagtcgagggacttagccatctatgtctgtgctgcagggaacctacatgcccctgaaagcacctaaatgcaccaccccctccaccctgcattgggacctccactcaggggttagtaaaccatcttcatcacctcctctgaccaaaagaatattgtaaatgaatgtaacaaatcagagaaaatcttttctaaaagacttttagaaagctttttgttcactgtattatcagataaggaattcagagtcatgagaaccctgatcatgagctgtctgaggtgattaggaccagggaccctgagtgttctttcgtcaagacccactcatctaagaggggctgtctcaatgattggagcggcttctcccacttgtgccattaattgctggtatgcctcagtttttgcatctgtaaaaattctcccacgagaacctgagagtaggcgtgtgatactcacatatttttctcctagtttttactttttatagtctaactagctaactccagtaagaaatcccatgatggtagttgccagatagggttgatatcccaagggagcacagtaaaatttctcagactgcccagaaggggttctgcttccacaaaaaagcagccgtctgcccaccccacccgtatttgcccacttgcaagttcttttatatacatcgctttatttggtcttcaatgttcaataatttgattaactgtggaagttggaactgattgaatgataaatacaagatactaaagttctgattgcataggtcccagaggatcacaaaaaagatctaaagtggcaagatctatctatggccacaccaccccaaatgtgcccaatctcatctaaaatggcaagatccattcagcattgcagcactggaatccccagtcagcattgcagttgcaggcccagtgagcccaggcaagaggcggaaaacatttactcttgagaccctaattagtgaactcatagatagctgcagctggcctgagactgggagagaagacagcccaatcgtctggagcttcctatacagactagagagtggtggcacatgcctgtagtcccagctactcggaaagctgtggtgggagcatcacttgagcccaggaggttgaggttgcataattgcgccactgcactccaacctgggtgacagagtgagaccctgtctcaaaagaaaaaaaaagagaggagaagggggtaaattgtaaaataatagcatatttgccaatttcctgtgaatttgtccagaaaatagtaggtagtgcagaaatttaacaccacgcaaacaagaaaagtagaccacctatggaagaaactcaacatgctgtactttaagaagtcctccggagttaagaacggctgtggcaaaatgcccactgttagcaccatttccaagtggaaataataaatgggaagggagagttaagaccaccactccctatacggcaagtcagcttttaatttagtcttttattctccttcttgttttacagggggaaaagtttacataaagctgaactatacagaagccttatctaagattggatgacacaaattaaatagggagagaaaattaatgcaaatgaaactagtagttctctgtattgtgagttttcatttttgctctgttgcctcttctataaaatgcagactaattcctgacctttcctccctcaaagaagaatgtgtgcatgaggaaaaaatcagatgccaatgaaaagctgtcagatgtgcaacacagaatgttcccaaatgaattttatgttgattgttctgagtcttctttcacaaagtcattaacagaagctcacaaaagcccttgccaccagtattgtagagctccttgacacagccaaaatcaggtattctttttttaaaaaagaaagtcttcagcaaattacagtataattagatatcaaaagtctggtttcaattttctctagactatctgaatgttattgttgttgtcattatttttcatcatttctcaaagtattaaaatacaatttggtcaaacaataatataaccaatacctgtattatcataacccagagataattttctgatattggcttcaagacagaggagggaaagaaaaaaaggaaagaaggaaggaagaaaaaaaaaaggaaaaaagaggagtaaggggaagggaaagagaaggaaagacgggaaggaaagagagagaaagagagagagaaaggaaagacaataaaagcttatagagaaaactgaagtcacagcattagcttggcctgtcttttccccacccatctcattctcctatccaaattatgtctttaaaaaacaatgtatcagctccctttcctcttcatgtttattcccaaataaattacagttccaacaacatcttttttcgttaaatattatggtccaagttttattctctgaagcaaaagacaaaaagtatcgaagagctttccctaagggagacatcataaacagcccacctgacatcccatttcctgttctgaagcagctacggcaccagtgcagctgatactcaaggttcagatcagaagaggaggcttctcaccctgcagcagggacctgtgagcatggcatgccctggcttcctgtgggcacttgtgatctccacctgtcttggtaaggaaggcgcatgtattcaccttaactagtattcaatagaacagagaagtgggaagaaagattaatagtgcaagaatctaatctcttcactgggcccagctattaggggcaagaaagctgatggattttgtcagaggtttggatcaagaggaagaaaggcgggtggcaatgggaacaggcttgtgagtctgtttctgtctctcacatggtatcccagtgaagtcctttctctcctctttcccacagaatttagcatggctcagacagtcactcagtctcaaccagagatgtctgtgcaggaggcagagaccgtgaccctgagctgcacatatgacaccagtgagagtgattattatttattctggtacaagcagcctcccagcaggcagatgattctcgttattcgccaagaagcttataagcaacagaatgcaacagagaatcgtttctctgtgaacttccagaaagcagccaaatccttcagtctcaagatctcagactcacagctgggggatgccgcgatgtatttctgtgcttataggagcgcacagtgagacaagcaacagggagaggcttacagaaacctcagacctcagcatctgtgcaaaggtcagggggaagtgttcagggttataggaacataaagaggaaataattgtcttccctaaagaaaaaaaaatgtatctgactataggaaacacagaggggatgtctataagctgtaatttttgaaatagtaataaaataatgaatccacacatgccttatagattttcaaagtaccttcacatgttaatccattaaacctgcataagcctgtgtgttacataggtcagatcagatattctaaggatcactgctatccagagaatcttagagcttgacctaaagctatattcttttagaattatatatttttgctttattattttaattactatctatctgtacatcccatgatcatatcaaagtcaatatatccaaaactgaatttcttaccatctccacaaacctttattttttcttcatttttttctcctcagccttgctcaagattcaggaacacaataaaagtttgctattgctgggtttccagtttggggaatttcttcaccctcgactttccagcctgggctatcagatttttatgcataccttattacattctaattataaaatggtgcaaaaaaaaacactacatcatgtcagtctcactgtttcccctctatccgtcattctttctgactttaacctggcttaatcctgtatttcttaacgttctttaaagcatcatttgtcttgacataagaaagtaaggaaagaaagcaaacgactgtcaagtaggatttcatgtactgctagtactcaccagcaaacgctaaaaaaaaaaaaaaaagaggaagttaacttctggtaatgctataattgcttctggtaaggcaacctagcaggtggtgacaattttgataaacctggtccaacagggagaccaagcagctgccatggtccaagtctccacccctatgtcttctgagaattgggagatgcctggaccgtgagaggattctcccttatgctaagggaaaaattaaaataaatgaaaaaaataatgccaacatttctttttatgcccacaattcccccaatacatctccttcactattaagccccttgtggagcattttattccatctgctcactgtgggtggcgagaggaagtttggaatgacaaacagccgaaataattaagtccaataagcaggctccagagcttaggctgggggtctgtttggaatgagtggtgagagtgactggatgtggaagagggtaaggggaggccaagaccaaactgcagaatcataattcagattgccgagtcatttcccaaacacagcagcttcagtaacgccacaccctagcccagcttagcacccaggcttctgcttgtctgaaaaagtggggtaggcaccaatcaaaatgaaaacctttctctcacacgaggaagacaccttcaggctattcaggttttgtcctcccttttacccctgaggcccatgagtcacccagacttagattcgggctagttaccaagtttcatatcaaagctcacttctttctatccttgcttctagtgctttcacgcagctcctctcatttgaattaataaataatcattaatctactctctctaccttcgattgtgtcctcttttaatatggtttagctgtgtccccactcatatctcaacttgaattgtatctcccagaattcccacatgttgtgggagggaaccagggggaggtaatggaaacatgggggctggtctttcccatgctattctcatgatagtgaattaagtctcacaagatctgataggtttattgtgggtttctgcttttgcttcttcctcatttttctcttgccgccgccatgtaagaaatgcctttcacctcccaccatgattctgaggcctccccagccatgtgtaactctaagtccaattaaacctctttttcttcccagtctcaggtatgtctttattggcagggtgaaaacagactaaaatacacccttcaaacattgcttcacatagctgtcccagtgagcatcctataataaaaatcagatcatgtacacacacctctgcctcaataaagcctcatttcccacagaaaggcccagtgattatttagaatataagtccatcaaagcggaggccaccactgtatctccagcacttaccatgcctaacagggtaaatggtcagggtcatctactgatggattaattagtctgtaccctgcttagcaactcagcctcatttgttgccatattcccatccccccaaactgtacacgcccatccgctcagcaaatgaaattgtttcctgcatctatgcctttgccagcattgtcccctcagcatggaatgcccatccccaattaaccacttgcctattatttgaaaggttcgcaaacctcccctcttctctgaatccttgtcctgacccttttgcactggtagaactgatcactttctcctttatctcctaactgaaaccctaagcatatttctaacgtggcaaatccaacaccttatggtgtttacaggtatttttcactgtctccccactaaaatgcaaactgttagttaccaaggacacagttttacccatttcaatagcaactgtgcctccaacaatctttaattcacagaaatgattcttaagttttttgaatgaaggtaattaattgatgggcattttcctcattaaacattatagagtaaaaatggataaattttctattttgttatctcctccatagttgtgttaactcagaattctgagctaactcataggactgtaaggcatgtcaaaaattaatagtaacaacagtatcatgctgataataaaaatattagtagtagctaacaattattgagtatatatatatatatatatatgcgccccatattctgagaggtgcatgacatgctttatttcatttagtagtcccaacaaatccatgctgtagctactattgatatcccagttttatatgaagaattaatataggttcaaagaggccaaaatgcctagaatcacacaatgtacgactccctgaccactggcctttttcccttcccaaagggtggcaaactgctatagcatctcagtcttattaatgtaatagacacatagaacataagaaagaaattcatgaaaacagtgctgcaccatacatgcacttgtagtcctcactttttctagagtagtaattgcaagatgagacttatttcaagtatccttattaatagaagttaaatgtaaaaataacactattaccattattgtttacataggaaatttttgcctttttaacattagtttataattatttgacctgggactatacaatattttaaacttcttcagtgcatttttcaatagcgtttaagtttaaaatgcagtctttggcaggggcattaataaatgtttcaaatgtcattttgtataactctttaaagaatacaagagtttagaagaaatttctaacctttccaagttatctgaatttccaagttatcataggaagatccttcctttgtaacttttaaaacttttttgtatatggttgggcgtttctatgaatgatgcttttcaattttttttgcttcagtgaaaaattatatattgtgaaagctttcccacataaacaagcagtttttctatagcatgagtttcccatggctacaagatattgtatttttgaaatacacctcattttacccaataacttgaggttttttttgttttttttttttgtttttttttttttcagatggagtctcactctgtcacccaggctggagcacagtggtgcaatctcagctcactgcaacctcccacagccaggttcaggtgattctccttcctcagcctcccaagtagcagggattacaggtgcgcaccaccatgcacagctaatttttgtatttttagtgggggtttcctcatgttggccaggctggtctcagactgctgacctcaagtgatccgcccacctcggcctcctaaagtgctgggtttgcaggcgtgagcctctgtgcccggcctaacttgagttattgatcgagtaaatcaatgaatacagtaagcatgataagtacattgtttccaaattggagctataataagtaaaactgtaattttaaaaagatacttgtacataaaatagtatgcaagtaagagagagcccagatcaaagtaaccgaagcaaaacaaaacaaaacaaaaatctgttggctaataaaactgaaaaatctgggttaactactttaggaaggactgaccaaatgctcaaataatgtcaccacagcgtgtctctatcgtttggctcttgtttatattggctttactctgaagaaagctcaggcccacatgatggcaaagatggccgccaggagcctcagacttgtgtcctactgtgttagtttcctcctgctgctgtaacaaattatcacaaacatggtggcttgaacaatattactttattatcctacagtttgggagctcataagtctcactgcactaacacaaaggtgttggcagggctgtgttccttctataggctctaggggagactgagtgaaatcctgagcatccctggcttctagaggctgctgcgtgccttggctcatggccctcttccatcttcaaaactagaaatcgcagcactgtgacctctaccaccattgtctcatctcctgtcaccctcatggccctcctgagccttgatccttgagattacattgagatcccccacatattccagaataatcttcccatcttaagattcttggtgaatcccattttctaaatcacattttcaaggacatttgccacataaagtaacatattcacaggttctgaggataggtggtggacattcctatagactgaatgtttgcgtcctctcaaaatttgtatgttgaagtcctaatccccaaggtcatggtattaagtggtaggacctctgaaaggtgattaggtcatgagggtggagttctcatgagtgagattagtgcttttataaaagaggccccagagagctgccttgctctttccaccgtgtgagagcacagcaagaaggtaccatctatgaaccaggaaatggccctcaccagacactgagtctgctgctatcttgatcttagatttcccagccttaattgtcagaaataaatgttggttgttaaagccacccagtctatggcatttggagtataactgccccagtggatgagagagacatctttggaaagctacttctctccttaccatacctgccaaattaacaactccagcagaagaaacaggcttcttttgtgatatttccagaaaatatcctggactgactttgcttagactgatttcttcagatttgggaaacaggcagaggtggttcctcaaggcaaagccaagatgctactagaagaggaatgaataaggatacgtaaaaataacagatgaccccaatgctattaatttatttcaaactcctttttgccatcagaaagcagtaataagctcacatatcaattccaataaaataattttttaaatcgcccaaacttacatttcaacatagcaagcaaaaagcaatgaataaaattgcttcaccaaaatatagaagctctgttgaccagaaattcagcatagacagttgttcaagataatttcaatgtgttcagcagataaagggacaaataaggactctttaagggcaaatttagctgagggatgtgttaaattgtatatttggcagactgaaactaaagaataaaaaaagagacagcttgatataactttctatgccaaacccaatgttatactctaaatctaaaactccagaaaaagtttgaaagcaacaaatatgaagtcaggaaaatcattctaaattaccaactatttaggtataatcttgagcattttagctgtagatgaaagtcctatttattcatatagattctcatatgctatgaataatagttcatttggatgtctctttaaatcaaggagggataaagacaggaaggaagaaagctggcaggcaataagagccaaagtaaagatattattttgattaaaatatactcattgttgaggtatccacaaatatttgagaacacattgaagaagtaagacaggtcagaaaatataagtatatgatcagcacttagtgaaaacagttaaagagaaagaaagagcaaaagaaaaattgcttaaagcaacatagatattcaaagataaggaattaaagctgagataaatgtgacagaaatggaaaggaaggaaaatgaagttatgaaacattggcaaaaatagctaaagaatgcagaataaaatgtcctagaaaacatttatcaaagggttatattttattagcattcagtagtcacaaggcaagaaatatgatagctataaataaatacatgagaatgtttaaggttttatgatgatcgtggctttactgttcaatatatattaaataaaccacaagttatctataacacagttctgaataaaatttaggaaacgtagagtcaggtacctcaatatagaaaaatacagaaataattaaccataatgcagacaaagtgacacccagttgtagagagcattacaagcattgaaatattcagaatattatttgattaaaaaaaagctcatgtaaagataccctaagcaataccaaagatacacacacacaaacacacacacacacacacacacacgacacatacatgctatatataggaaggaagaaagcttctttattggggacacagtttacatattacctcttgtttctatgagatgctataagaaaaaatctcttaagatttactacatgggtaatatatttatatagtgtctgtgtgtatgtatagcaaactcttatatatatatatggatatcttacagtcttatagacttatatgagagtgacagtaaaagagagagagagagaggagtgtatacctatttcctctcaaaaaggccatattctggcaactcccttattccccattccctactatgcagtttgatctagccttagatttcccaggaggttctcttccagaaaagtgcctgtagctataaaataatcttcatcttggctgtttcaatgcaggattcctattgagccaataccttaccattttctttccttcgtggaactgtgctttgtcataatgcaataagttttctatgaagtatatcataaacaacagtcctacagaattcatcattggacataatatagcttctttattggggacacagtttacatattacctcatgttctatgagatgctataagaaaaatttctcttaagatttcctacatggataatttgtacctacacttgtagtttgtttttatcatatggatgaggtaattatcacaggactgattgttttccttctttacattgactgctaataagttcagagccaatgttagcttaactccaactatagaggctgattgcatatattttaattccaaatctaattcaaggtttatgttcctgcccttatttttttcttcttgatttttgtatttctttgctgttgtttttgtagatttttctgtgccttatacttttttcaaagataattaaaacagtgtgtgaattcagtggggtggatgaatgaatgaggcagagaaaaaggaaattgacatggtaggataacaaactcacataatatgtagatacatataaaaagacacacaaagaaaaaaatttctctaatatatctaatcttctttatgaatgatcccatctaccaaatagtcaagaaacttaaattttgtaaattgcaattaacaatgtctcattttattcaggtttaaagagttcctttcactttaaatattcagttcatttaagttcaattccatgttagggctgatgtaaattctttcttagatgactcagtctctttaggtgatatgtttggaattcaaccaccttacccttttctttccgtgatgaaatttaggtgataaggtgagacagttgagtgtcacctgaggcaaaaaaaaaaaaaaaaaaaaaaataggcttaaatccatgcattgccttctggatcttttggtctgagcagctgagcagccaatctactctgttccctgtgtaggtacctagttatatatggattttcctacctggacttttgggattatgtgttgacaccactgctgaagccaattgtttcagccgcttgactccatctcaaagaccctcatcatgggcacttctttgtacttagcccaggactttgccaggccactagctctctcaattctctgcatctacttcctggacccctggggacttctgtattccctgcacctgtaaacagaccatggggattctagaaagtagcctctgactcatgtagccaagccttgatttttctccagcgccatcttcccacgacttaagtaagacttcccccagagacatgcagcctgcccctagaacactgtgagaggtgctctactacccagtactcttgtgctgttcccatacttatctaaatgcttctagcctttcctaacccaatcagtgtccgcccatagcagaccaggggaaagaccagagtcctgacacctaagttccttgttctgcctccatttttctttaccctctaggacccaaaaaactgacctccctctctgtcctgcacctttctgtcaaactgatgtaaaactctatgatcaagtccagctggtcttacatataatatggtaaagaatacaataaataattaagaaaaagtgttacacctgaaaaaaaccttacttttaaggcagttctcttgttaagtaatcaaagatccaaatttagatgtcagagctgaatattaatgctttctatttccattcctctcagaataatctaatctctccccactcaagacagatagattcctcagaagaatatagataaggttatgtatctgaaaatataaaggagaaaagaatattaatacatttcaaaaatataatctcaattacaagtagagggaggaaatattttatatcaccaagggcactcattggaaaatcaccatagatattttcaaagaaaataaaagacttccaaaatcaaaagaaattaagaaaatgaagaaaagacaagccacagactgggagaaaatatttgcaaaatgcatatgtattttttaagtggtatccaaaatgtgcaaagtactcttaaaactcaacaataagccaggcatggtggctcacgcctgtaatcctagcactttggtaggccaaggtaggcaaatcacctgagatcaggagtttgagaccagcctggccaacatggcgaaaccctgtctgtactaaaaatagaaaaattatccaggcatggtggcgggagcctgtaatcccagctacttgggaggctgaggcaggagaatcacttgaacctgggaggtggaggttgcagtgagccgagattgagccattgcactccagcctaggcaacagagcaagactccgtctcaaaaaataaataaataaaataaaataaaacaataagaacatttaaaacccaatgaaaaaaatgggcaaatatctgaacagacacctcagatctgaactatctgaactatctgaacagactataaacaaagtatatagatggtaaagaagcacatgaaaagatgcttaacatcaaatattactagggacttgcacattaaaacagtgaaatatcactacctgcctatcagaatgactaaaatccaaaacactgaaaccatcaaattttgtgagaatatggagcaacaggaacccttattcattgctggtaggaatgccactttggaagatagtttggcagttactcataaaactaaacattctcttaccatatgattcagcaatcatgctccttagttttaactcaagtgagttgaaaacttctgtccccataaaaatctgcatgaaaatgtttgaagtacctttatttataattgctaaatcttgaaatcaaccaagatgtccttcaacaggtgaatctatcgacaaagtatggtacatccatacaatgaaatattattcaatgataaaaagacatgaccaggccgggcgcagtggctcatgtctgtaatcccagcacttcaggaggccgaggcaggcagatcacctgcagtcaggagttcgagatcaccctgggcaatacggtgaaactctgtctctaccaaaaatacaaaattagctgggtgtggtggcacatgcctgtaatcctagctactcaggaggctgaggcaggagaatcgcttgaacgaggatgtggtgagccgagatcatgccattgcactccagcctgggcaacaagagtaaatctccatctcaccaaaaaaaaaaaaaaagacatgaccacaaaaagacgtggaggaactgtaactgtatattgctaagtgaaagaaaccaatctgaaaagactatatactgtatcattccaactatataacattctgaacaaaaacaaaactatggggagtgtacactgatcaaagtctaatgtaaattatgggctttagttaataacaatatattaatattggcttatcaattgtaacacaagtatgacattaatgtaagatgtcaataataggggaaatggggaggatgagggttgagggggtgtataagagctctgtatttccactcagtagtaatacatcccatgctagtcttaatcttaaaaagggaaatatattctagttgctgtatttcacaatgctatgatcattccttgtcttacttagttcattaaagctgccatatacaatcatagactaggtagcttacgaattacagaaatttattctcagagtctggaggctgggaagccccaggtgaagacaccaatggatttggtatctggtaaaggcccatttcctggctcataggtgacattttctcatcatgtcctcacatagcggaaggacaaggcagctctctggagcctcatttataaaggcaccaatctcattcatgagggctttgccctcatgacatagtcaccgcccaatggcaccacctcctaatatcatcactttggcaattaggtttcaacatatgaattccaagggggaagacaaacattaagattgcagcagtcctttcttctctatcaaatccttgcttatccatctagatcctcagcaaatacaacttagactatatagcccataatgatctactttgctaatcaactcacatacaacttcttgactctgccatatgggggactttttaaaacattgacttatatttctacttaatcgtgtacaggtttatatgtgtcaatattcagaactatgatttacacacatagaaacatataaattaaaccaccatcatcactcccaatcatacacacacatgttcatatacagcatccaataaagcatcctattcaaatttggtaataaataaatatttacttcttgaaagatcaactggctaaagaaaataatgtattccgattcatccactttcccaaaggagggttctacacaacaatcactagtgtgtgcctttggtcacacttttaagtaacagtaagcaatgaaaaaacaaatagaaaatgccaggctgctctcatttgcactcctgcttcatgtaaatgctttcaattattcatctagcaaaccacacacacattgcaaatgcctaaaatttccttttgccaattagaggtaaacgcagtccccaatttctatccatagaagaattaaagcaattctatttgcatccaatgtaaccaaaagttgcctttctcaaaagatacctatgtggcctcaataatccagacaaaaggctcactctctcagtgtggctgctgtacttcttgcctcttgtctgtataatctactgaaattaggtaccacagcactttctctccaacaaatccatggaaagtaggaaaacatgttgaactactccaggactcccaaattcaggttgaaattttctttcaacatagaagtagaaacttctggtgaaagatggtaatagctcagcaggaagtcagcacaaacctctaaaggcaaagcaggaggccggagtcctcccctctctccctccctcataaggagccctgctctggagacttccatggggacaagagagaagaaatcgttttgctgctcagatcctaggattgagtgacataggaatggagggcccaaaaatttgagtaaaattcctagacttggtttctgaaactatcctgactctaagattaagcaacttctcttcttaaatttcttcttataaatctctccttggggaacgttcctgggtggataaaacctatggaagaggggaaacagagttgtggagattaaagttaaaataaaaaaaagtctttttgttttgttttgtttaatcctattttctcattatttatctgaggtaatcaagatccagagaagtccctcccttgccctacatgggatagcagggggttccgcaaggattctgtcctcgcactgactcccactcccagtctgtgtctgcttttcataccaaacactaaatatgttattaaacaggagaataaaagttgtgaatatcaccctggcctagacagaaacacacaatatatacaataccatactataacagatattctactagatatgagagagccaatacaggctaatgaagaaacaagaggaaaagatgaaaaaaatgacatctagaggtattcgtaaaataaaaatctaataggtaagtaggcatgagttaatctgatctttcctctaccccaaattatttttctgccccaccgtctaggctagaatgtctacttcctgcttctgtgcctatagtcatcttagtctttgtctaagaacttggtcaaaccagaacctttaggtattgtgactccatcagttaatccctatggatattttgcttcttagtaacattctgggataacatttgtagactgctttggttattaacaaaaccaacaacatggagctttaatgcactctctaacttgagttctttgtcttgtctcttttacagctgcgttttctctgtgacaccaggaatcagcatttccattcaaatacagcaaactttaaaccgctttttgacaggaggaaacactttctgcctaatgaaggggatgaagcaggtaacccagagagtatctgccacacaggcctcctctacagtagctcagaattgcactgtttgattatttcttacacgtggcatctgcaaattcagaaaggtgagtgatgtcagatctaaaggtcccttcttccatcttggttcattcaaattcaggtctaagaggaaacattgaagaagctatctgaatttcaacaggactgattactttccaccaaaggctgtaggagacacagatttaaagagtgactagggggttaaacataaacatatattgacagtaattcctgcattgtcatcaaagtgtgctcatgtttgtaggccaactcttagtggtattcagacattggaaaactgtaaaaccttcatgcatttttaagatgacttctaaaatattttattattagtttaaatgtttaaatagctacaaaggttgtaaattccactgtaatataaacattgacattttcaaataaaactcagaatagcttttaaacatatccagtgaaaccttaataccaaagtgatttgatacccatcaacacccagttaaaattcacaacaagctcttcattgacaattgaagaccttatattgctcttttctttccttggaatcatatttccattcaacttctcctgcagaacttaattttagtatatttttgtttaaaggcttttgttgatcacccaaaatgcctgcaacaaaatcacgtaaaaaattgaaattgcttttaaattttctctgaccatactgctctaattgctaaaaattatctttctagattgagttataaatataattattgttgatgtaccttttattaaaacaacaaaaatatatttcaattttagttttaaacttacaggcgaaaattttttggaaatgcatttcttaagaaaatcactggggtcggcccggcgcagtggctcatgcctgtaatcccagcactttgggaggccaaggcgggtggatcacgaggtcgggcgattgagaccatcctggctaacacggtgaaaccccgtctctactaaaaatacaaaaaattagtcgagcgtggttgcacgcgcctgtattcccagctactcgggaagctgaggcaggagaacggcgtgaacctgggaggcggagcttgcagtgagccatgatcgcgccactgcactctggcctgggcgacagagcgagacactgtctcaaaaaaaaaaaaaaaaaaaaaaaaaagaaagtgactggggtcatatttatggttaattaaaggaggcttccttgacaccaataaattgtccctttgtttaatgttccaggggtgtttaaactgcagggcaatgctgcaaaaggagattccgtcttgaataaggttggggaagagcaattatgaaatttgagacgggaaacaagaaccacagtcaagctcttgaacagatcacttttaggaaaggttacatacagaagttgaagatctggaaattgattcccttaaaatacataactgttgcctagtttgaaaaatcactgcattagattgctctccacattactgatttcattctcagccagacttcatgaagtggtgaggtttgaggaaaatcagcaagagattttaatgacagagccttgagtttcagtaaacctgataaatttcctaaaacttatttgacatttctggcttgaaagaatagctcctgatgaattagaaaattatgggagattgagttcttgcatgacacaaagtcatttaaacatatatctttatcttgggaaagacagtttaaatgtcatggccatttattaataatattgtgaaaaaaagttatcccaatcctggaaaaaagaaaaatgatggttgctagtctttttttttctctatctgcaagagcattttcaagtaagcaattatctggcattcttggggatcgtaactttgttgtcagagcatatttacctagcaatccataactgagaaaaggctcacatagtttacattcctgtgggttggaggttaacccacagaaatggaagagttttgcgttcatagcctggaaaaaaaaattaaccccagattatcgtgtcaaccctaatagcattttattttgctatctatatagttgtatctttttcctgtaaacatttgtggaattagctttttttagttaatgattaagaatagtaacaaaatgtgaacccaggctcactccctatttgtattagtattttgttttttagcacatttaaggccatcctggcactaaatcagaaaactacttcctgatacctaaactataaaatcctggtttcatatacatctgaattaggcaaaaacatagctggctattatttatttaatttgatgtcttaacatgtaaagattttcttttcagaagaaatctaatggaccagatgtcctgaaacactcttaattatttttcagtagtacgaacatagccatgaaggcaaaggaaggtagatgatcaattcatgttaagagtttcaaattccatggactaatttatatctttctccacagccacctggcacattctgcctttgaacagatgctttacaaaaacataatctgtggacatggagatcttgcataaagcaaattctctctgatccacagcttcactgaggggtttcagttttctaggccagagtgactgctggagatgaagagattctatcaaacgtcagtgtaaaattgtctcttacttaaaatgccctcattgatcttatcctgatacccttactacagaagtttatcatgactcatctaggagataccagagagttcactagccaattcaagagcatgacttctcaaaattctccatgttttcctctttccttcctagctaatcccactttctcctgcctttgaaggctatagcttctctgccaatttcttgaattatggggttcctaagccctcttctatgttatccacagattctaggcaatcttactggctcctgagcctcgaataccatttaactgctctagactgacaaacctgtatctctagccaagactctccttggcacagacacactattgggctccctatctcatcaccccataggtccaccttctctgtgtccccatcctagtaaacgaagccatcagtgcctccaacatgttctcttcagtctagccagagttattatttaaaaatacaagtgcaatctgtttgctctcttgcttaaaactaatcagtgacttccagtttcccaaaggatggaatcccaaatcattactaaggctcacaaagcctttctttctctagcttattcctctggtttcatctttcatctttattcttcacccatcttgcactctgtgcttaatatctcctgtttgcttccaggtcctctctccatccttccacaccctgctttgtgccccaggtgactgacctatagggattataccaataagctatcttgtcttttggtttccagtaggtttttgcccaagggcagtacccacagagaacagaaaaaacgaggaaagtaaggtcaggctatatattcccccaacttcctcccttcccacatactgacattaacccacaatcagctccttacggtggcctctccaaatagcctgtctttctccaggttttggtaatcactccctcctttccattcaaggcctggagtgatgctagtcccaggttgtagcactatctcttatatgttccctgctcactgcttgtatttttataactagtgtcatgtttctcaaattacacaatttcagtatgccataagtttcctaccagaacccagattgatactgtctgctttcaaatcctaaaaggtgtcaactatggcttaaatgttccttatttcgggaggccttttctagccgtcttgacttggatgtaaccgcctgctaaacctcctacagcaccctgtccatctcctgacagaacatccttcacacttagcagcaatcattgaatgagtattagtgtcgccttctctaaacaacaaacaaactgtgtcagaaaaatataaagcaaaatttgtaggaaatataaaaataacttgataacatattcattatgggacaccttaatatctttttctcagagagagaaagagagagaggatgatggaaaaaactttatattaaacatatagctacagaatatttacaaaaaaatgagcatataatatgactcaaaaaatgggaatcatataagccacattgtctgaacctaatgcaataaagctagaaactaataattaaaagatagcaaataaatgagtagaaagagaaccacttataatattctaaaacattttcaggtcaaagaactaagagttaaaattacacgtcactaaaaatgaaccctaataatggtactacataaaaaaactatatatttgttcaaagcaatattcacaagaaaatgcatccatctattaataaaaagtaaaacaaaggaggcaaatctggcaattcaagaaataaaaaagaaatgagcaaaataagccaaaacagagaaggggaaagtttaatgataaaagcaggaattaatttaaatgcaaagcaataattagaatgtacaaataaaggcaatatttctaggaaaactgataataaaaaagaaaacacaaatgtgcaatgttaagaacgcgaaaggtgctataaccccacaaaaaaaagcaatttttcaaatcactggttaatgccttgtatacatagatcttgatgaaattggtggtgtttagaaatatataactttttaatttaaacttctctactttctaaaaatttatactattttacaattccaaagtcaatatcaaattgtaaagaaaaaaatcctgaattctgcctcttcttccttcttcacatacgcagcaaataaatgctacacatataccaactactatgtctcgactctcctatgttttcatcattaaagaaaaaaacattgcattcctactatatgccaatcattgcactacacactgggaaatcaaaaatgactatgagaaattccctgctttcaaggagttcatagtctagtgcgagaaacagacagatgtgcacactgattataatactatgtggtacctgtgataatgcataataatgatagatgtctttactgagtttctgctaagtgtcaaacaccttccattcagctgagatcttgtcctttcctccaactcttacccgggcattttcacataatagctcgttatcatctcaatttcaaaacactttttgtactcagatgcttctccaatttcccagtttctgtaaatggcaccacaacatttccttattcaggcttgaaccttttgagtttatagtcaggtaccaatgcttgtcagtttttcctttgaagtgctattgaatgtatattttgtttagaattcccatgactaccaccttattcaagtccttagattgttcccaccaagttgaaaggggtgtcctccttcctcttcattattgaagtctctttcttgctcttctcccctatcctaccagctcccaaccaccctctgaccctctgcaccactgccacacctttctttttaagatatcttttcatcatatccctccactattcacaatcttacaacagtttctattttctcatgaatataagccctttgaagtagctttcagtgacttccattatctcctcctcatttcaccaatttatcctcattcccagacactattacccagactctgttttctctgttagctggaccattcttcacactttctcaaagacatgtcatcctcactcctacctctctatatttcctgaaatagcctttagtgcgtgctctctctctctctatctaaacattatgtgttttttaggccttagctcctccaaagagattgtactaaattcctatagcctttcataatttccctctcttttgacctcacgtacagcatacacaaaaaaaatgcacccaatgctatgctactgtacaaagcagtgtactgctttgcactgttaactttaactctatgtgcattattttaatctttctaactatcttacaactccattaaaaccaagactagatactgtggaattatttaatacccccacccacctcatcatttatcacattacttgatacttggtgagtacttgctgggtacatttgaatgtaatgtcttttatttcttaatgtctttcattttctcaagtgttgttaaaggcaaaaagcaatgttggatggttttatcagttatgcagagttcatgcaggaaaagagatttcagtgggaccttgcttaagacaatagagaatttagtttaggatttaacaggtctagaaattaatgtagaaagctgtcccacaaagatctattatccagaatatgtaaggaacctaaacaattgaacaagcaaaaaacaaataactccatttaaaaatgggcaaaagacctgaacagacatttctcaaaagaatacacgcaagcggccaaccaacatatgaaaaaatgctccacatcactaatcaacagagaactgcaaatcaaaaccacgatgagatatcatctcacaccagtcagaatggctattattaaaaagtcaaaaaacaacagatgctttcaaggctgtggaaagaagggaaaacttacacactgttgatgggaaggtaaattagttcagccactgtgaaaagtagtttggagatctcgcaaagaacttaaaacacaactactattcaacccagcaatcccattatggggtagatatccaaaagaaatcaaatagttctacccccaaaagacacatatactcccatgtttattgcagcactatctacaatagcaaagaaatggaatcaacttaggtgcccagcgatggtgaattggattttaaaaatgtggtacatgtacaccatgtcatactatgtagtcataaaaaagaacaaaaccatgtcctttgcagcagagtgaatgcagctggaggccattatcctaagcaaattaatgcagggacagaaaaacaaataccctgtgttctcacttagaagtgggagctaaatattgggtaaacatggtcataaacatggcaacaatagaaactgggactactagaggaagaaggaagggagtggagcaagggctgagaaactaactttcaggcgctatggtcgctgtattagtcccttttcatgctgctgataaaaacatgccaagactgggtaatttataaagaaaaagaggtttagtagactaacagttccaagtggctgggaaggcttcacaatcatggcagaaggcaaaagacacatcttaaatggtggcaggcaagagagaaatgagagccaagggaaagtggaagcctcttataaaaccatcaaatctcataagacttattcactaccaggagaacagtatgggggaagctgcccctatgattcaattatctcttactgggtctctcccacaacacatgggaattataggagctacaattcaagatatttgggtggggacacagccaaaccatatcactcactatctgggtgatgggatcatttgtgccccaactgtcagcatcatgcaatatacccagataacaaacctgcacttttttaccccctgaatctaaaataaaagttgaagggaaaaaaagaaagctgttccacattgattgcagtgagtataatgggcaaaaattactgcccccaacccgcagcccccaaatcctaacagaaatctgttacatacacacagacaagcatggattgagcattagctcagtagacaggtcggttgaatcccactttccagctgcatgatcataaacttattgtttaacctctgtaagcctgtttattcttctgtaaaatatagatcttgtgagaattaaatgagattatgcattcacttagcatagtgcctggcatacagtacagctcaatacatgttagttattattatcatcttttgtcctttcttccacaactttgtataagaagtgttggaggaactgaagaaaatgtgatgtgttcaacatggtacagaaaaggtacaccatgggcagatggtcaaggtgagtcatagactaacccagttcacaggagtagctactcatgttagaggagtcctaaagaaataaaagccttccttccctcccactctccctccatcaatggtccacagagttgagagaacacaactgtggtaggcatctaccattttgttcacttagaatggcaactcattcctggtaaaatataaattctaaccatgtgttatgaatggagactgctatcttacttatgaatgggctgatgaatccacccagaggtggatgcctgacccagctgaaccaatcatgttatgtatacaccactctagtcacaaattgcccccctggatgggaacctggctcagactgaagcaatcaaagacttacctcaatatttttaaatctgggatcagaaaggatcctcagtacttctttggtggctacactgtgagatgaatcccaaccaaaaaatgtttacaatcatgcctcctgctttgtggtggaatctggtctgaggaatgaaactaagacacgaatgaaaggaaaagtcttaaaggattaagttccctggcaccctggatgcctgaagtccagatacacttctgctcttgccaaggttattggagtcagtgcatttctcttcttgcctaagcacatttgagttacatttctgtcacttgtaacatcaatgagacgttaaagagttaattcactaggaaatttttaggaacaccttgctggcttacaagaagcatcaattctacgaattactttctcaggaatttctctaaatatcctgaagagggcactgtttccattcataacttctgtccaaacccacccccattcttttgtttttttttaatttttctttttatttcttttttttctttttttttttatgaaagggagggactgagtaaattgcaggatgtgattctaattggttggaacatcttttgaaatcgtgtttctgtagagaaagaaaaactaccatatttggatagccctggccaactttcaaggctcctaaatctgagttttcagtgaactggacagaaaaaaaaaatgaagaagctactagcaatgattctgtggcttcaactagaccgtgagctgggggttcattgaaaagggagccatgggaggaaaggaattgtccatacaatgtttgggggtagagacaaggttcaatgcgactcatttgggttccctcgggaggaacaggattattggggtaaccagtgaatgcctccttctgaaatgttctctttggacagggttaagtggagagctgaaagtggaacaaaaccctctgttcctgagcatgcaggagggaaaaaactataccatctactgcaattattcaaccacttcagacagactgtattggtacaggcaggatcctgggaaaagtctggaatctctgtttgtgttgctatcaaatggagcagtgaagcaggagggacgattaatggcctcacttgataccaaagcccgtctcagcaccctccacatcacagctgccgtgcatgacctctctgccacctacttctgtgccgtggacacacagtgctcccctgacgccaccagtctgtacccaaacctgcagctggtgggcccactcctcctgcaggaactatgactgtgaggcttcgttcactgtctgtacatttctttctgcaaggaaaattctgagatgggtgaaaaaagatgctgttttaccttcttaactgtggaatattttttaaaaggaaaatgtgttcaggctgagggaagattcctaaccatgtatttcctgagaatatgaggtctcattctttactgcctcacagtcagaatttgttagtcttccattatggaataattttacatgtagtgcaactgtcacaaataattcctatgaaatatggaatcattatttgttttatatgtgaatgtaacatatggcatttaccaatgaaagaaagaataaatgctttataaaagaatggtctatgtgaggttccttacctagtgtttcctgctaaaatattgactacagtagtcagataatatccgtgtgatctaagtacctgtttatctcaatgtgtggagagtctctgggaaatgtatcctttggctggatttactccaaaactatctgagggtccttgccaaccagaagaatattatattttttcttgtattatttgccagtttcctcttctcctccctccattttttttttgtaattgttttgctacatggtagaatttatattaaactttatttgcccattgcagactagataaaatgaatttcactttcaggaaaattgtcttataagaaatccccaatttgaatgttatacaaaaataattgaaaataagttttcctgtcccactaatgagataatcagtaccttcagatatcaattgcatcatattttcatcccagacttctaggaaaataataaacttgattcagtcaggcttttaagtgacaatatttcagaaattaccattacaatgtaaaagctgaccttaacatttcaacatttgtaccttcctaagcaacagcacctttaaaaacatttaaaaactaaaaacacttatttctctaaattgcccctagagtctttacaagcgaatcagcttctgcagcaatttgttggcagattatgaaaagtcagccacagcagtgtacagaccaaaagctcctgctaccactcagagcctccagcagggactataataacttccgtatttagataaaataaaatttgacatgaaaaaccgactagttccatcatcctttgagtcaagcagaggtttcactctgacagagtaggctgaaaaaactttgaccttgtatttataaatactcacaacgtatcttaaatttcaagtttcttgatctgttaccaaagcaagtttccttgtcaatgactgattgtcgggaaatttttattttgcattgatgatcttatttgttgtgttgttacataatcagaaaacaggatgttacatcagattttctataacctttctggagcatttaacagcatgtcttcacacactcatttccatgctgaaaacattttcaccaggaaactattcatgacggggaaaaaaatattgttcaatccaatctaattaactgaaggaacaatattgacttaagtccccaaatctcttccttcttagagagaactcttggattctgaagatgaacttttatatcttcttcagatcaagaatataaacaaaccctaaaacaaatgaatagaactgaggatttcattaatttgatctttagaacataaaaaactaagttctttccacttctccttcccaattttcctgactccttcccaacttatgagtatatagattttttgctttcttttcctagaatcacttactgtcactgaaaatatatcattaaaccttattctcgaagaaacaatacagacattcaaaattgaaccagttgactttaagggtgtgatggtgtagtaagaaaatactatcgaaggtgacaatctccaatacattagagcatgctaagccaaatatgttttcccccagtaggacctttaggaatgtctcaggtgactccaagcttccggcacttgctgtccatgaccagagcttctactaacaagaagttccataaaatacttggatccatcctaatcagatacaccagttgccaagtccacttaccacagagattaggaaaggagacatttttctcagttgtgctattcatgtcccagaaatggcatttaagacaaataattctttgagtatttcttccaccctgtctcatctgttttggtgtgaactagtctcttttttcattgcttttaacacagctggttattttttcttttaatagtgtgtctgcttcaaggtttatctagaagttgtttcttaatatcaaaaaagttaacattttttatttttactgaattatgatcagagaatgcacctgtatgagctgtactttttaaaaactttcattaagatttacttgaaggccaagtacataatcataataattttattggaaagctatgaatttatatatatgtgtgtatctatgtattcaacttttttgatcatatcattaaatcttcctatgtccttgtttccattttctaaaatctgtcacattctgaaaaagactatcgaaatctttcacttattttgtcaagttcttgcaaattgcttttgctttatctagctgcaatgttttcggtgtatatggtttatgacttacgtctcttcagagagtctttttagcattaataatgtccaagaaattatccatctcttctagattttcatcattatataaagtccttcatcctgtgtggtgcagcctgatattttttcctcaatatccattctactgtcttccccttttttactctgccccagaataaaatctgtgttgcccagacctccttacagctaagtattggcatgaactaaattctggtcaatgaaatctaagtgtaaatatgaggtgcaccttctaggaatttatctaagactcagtatgcatgttcttccatctctcccagctacctggcctcccatcccctttcctgctggatttgttgatcctcggagactcaagtacatccttcacttagtctatgcactatataccttcttcaatgaggtccctgtgtcagggacatggttctcagtttccagctactttccatgagctccctcaagcaagcaaatatttttagaaggtatttttagaagacaacattttaaaagaccatagtgtcctttctactctactgtgtctgcaatatgttgcagtagaacatttcacaaagctagatcttctcagagctccagatgggaaccaggcaaaaagctctctttgcagcggacagtcaacctatcttgtggtttccattgtccgcattcctagctcagggttttagataggatttgtgattttttaaaactgccctgaaacctcaggctctgctcttgacatataaattatcaaaaagaaaaattaccaagtacctgtctcttgcaactcaaaaaaatgccttatttcaggatattttttcctcctaagactttttaagtccattttgaatacaaaatcaataatttgaccctttgatctcactggatcctttcacaatctccctttactggagcaataagattcatcctcaaaatttgtggcaagagatttacaggggaaaaaatgaattttaaagaaggaaattatcatatttgaaactgttagtccactccatttagactcagagattctaataacacaacagtgtgaacaccagatttggttatcagaaagaattcctgagtattcaaactcttctactgtgagctctatgcccttaggcaagtttcataatgtatttaagcctcacttttctcatcaaaaaaatatggaaaaaataataaccactttctaaagtttttatgacatttaaaatgagatggtgtatatgtaaagtaaacagcacacacaccagatcttctagaacagtgtttactagagaaaattcataaagacaagagaaagagcaggtgtgtggtttccccagaggcagcactcaccctacattctgaaacagcacacagcaacctagcatggccaatgtgagaccctaagaaagagaacccagtcttgagccatggaactttaaggctgcactggggaagcaccaggccttactgtagcatgggggctgggctccaaattatgtgattatagcaaaatcaaggaaatctgcaacctccagtcctgatctgccacctcagctctcttacaaaatttattgcctcaagtgctaggctggggctctattagaaccagttccttctctggaaggccaccctgcagggaatccattacccttacctctcagtatgtgaaattcactagcacagagcctggcatgtagttggtataaatgtggaatgaatgtgtgcagccatggaggacaatgtcttcagtccctttgtaatgcagaaagtgtgcttgttctcagatcaaataattaacttattgaacaagtgtttataggtatctactaggtaccaggctgtcttctagacacttgaactatcttcttttaaaaaatgcacgaagatatcagattttatagaaaatacattctagtaagcattaaccataagtaaattactatatggtttatgacttcagagagtctctttagcgttaatatattttgcattacaatatatgagaagataagtcggacgggcgcggtagttcacgcctgtcatcccagcactttgggaggccaaggcgggtggatcacaaggtcaggagatcgagaccatcatggctaacacggtgaaaccctgtctctactaaaaatatatatatatatatataaaattagccgggcgcggtggtgggcgcctatagtcccagctactcgggaggctaaggcaggagaatggtgtgaacccgggaggcggaggttgcagtgagccaagatcgtgccaccacactccagcttgggtgacagagagagactccgtctcaaaaaaaaaaaaaagaagataagtctatggagacaagaatcagagcaagttaggggatagggaattctggagggggccacagaagggtggttcccttgtaattttaggtaaagtgtcagagtagcctcactggaaggataacatttgagcaaaattgaagaagatgagagagtgaatcttgcatatacttggagcaagttttccaagtagaggagagtccggtcctaaattaggaaatgcctacatgttctagaactaggtggaatgagaagccataggaaggctttgagaaaggagtgataaaatctgacttccatgtaaaagtcttactctggctgccgtgctgagaatagactgcagatcatcaagatgaaagtggggaaaattgttgtattaacattaaaaccaaagatatctggtgttactctgagctcagaggcttcttccaccagaaaagctcattcaagagcagctgttgttactgctcctgctgatggaagaggggctaaagacatatttgatagcctttctgtagatctcttgactgcagatgacctgtgagtttaggggaaaatgacaggaaggagtcttaatttcagacacaagaaggtctgttgtgaaggcatcttccagaaggcaatatttgtgctttcttctgttgtgtaagactccctactcaaatttaggcagtttaaggaccttagaaaattgtgctgtggtgataaaggtaatggaagtcagagcagagggataataaaaatccatatgcctctttgaaagcctgtgtaataaagatatctgctgcctcaccgatctgaacagggttgaataagcaacaaatggacaagaatgctcagtccctgagctaccaggagacataggcctttagtgggactgcctatataatttacgggacccagtacaaaatgaaaatgcataacttcctaagaatttgaagactgcaacagcagagcattaaagcatgagttctatgagactgtacaggtttcatacccaggaagctggccctgatcactactagtttggaatgccatcattattcagatatcgatgttacaggcaggagcatgggaaagaccttaaattaatttgataacaattcaacctagtggcatacagaatgagggcaaactaactgagtagtttggtgtagaaaagaagcacctcacctcctcaaattacctctgagatggtgagatgccctgtccttttgacatctacatatttaatataaactcttcacctaggaccacagcagtggcagagatccagatgctcggagagatctatttgcacaagaaaaaatatgcataaagaggttaatagtcaaaccaaataaggggctgagttgtaccgtgagcttttttacaacttcaaagtgggaaacatttattgcccttactcatggtgctgtctaaagaataactttttactctcctgaacatttcagggttctactcttattagagaaattgtactattatcattttatttttaaaatatttttagaaatgggggtctcactgtgttggtcaaactcttgagctccagccatcctcctgcctcagcctccaggggagctgggactccaggtacgcaccaccccacccggccactgagtcactattaaaaatcatttagcatagccaggcctggtgtggtggctcacgcctgtaatcccagcactttgggaggctgaggtgggtggatcacctgaggtcaggagttcaagaccagcctgaccaatatggtgaaaccccgtctctacttaaaaaaaaaaaaattagcctggcatggtggcacccgcctgaaatcccagctactcaggaggctagggcaggagaatcacttgaacccaggaggcggaggttgcagtgagccaagatcacaccactgcactctagcctgggtgacagagtgagactccatctcagaaaaaaaaaaaaaaatcatttagcatacccagtctggggctttctactgagagcctttgttgacttctcttctaaggcaaagagcagggatataaagaagtaacacttcgaaagatggatgttctagttacatttctaggctctgaaatcaaatacttaatccacatattgactgattaatttatccaacaaatattaaacttgaccgacccttatagtgtctggagcctagtaaataactattgaataagctgtgaacagacagccaagtcctgcggactcagagaataatgagacaaatcagatattgaatcctggcttcaccacttttgagcagtgtgacctggagcaatttgtttatcctctctgatcatcaatttcctcatctataaaatgggaacaataatattaacacctattttcacaatcatgtggattaatgtatgcagagcctctggttcatcactaagcactcagtaaatattagctatcatcatcatcattactaatttctattgatttaactagacacagaaagggcagcatgtgtcttacaagccagcgcttccctcttctaaccactaattcaaaaaggattgtaagtaatgtttagaggtcactccctagcccaaaataggatgccactgtgttgtgctttgttttctttcttcctccagtgctgaagcacttgtgtgttttggttaatctaagatttaaaagattcctacatgtagtcatgcaaagtacttgtatatacctctaaggacctagcaggtctagtgatcctggagtctcatatccgaaagaggaaccagtactaaaagacaaacttcccaaaatctaaagaagggaagtgcaatcaatggtatgagttagaagcctcaatcctgggagagacagcctgtgcaagccaggagaaatcatgggttctccagtccccagcactggagcagccatgatcagtgcctccacttcaatgcttgtgaggctgttactctctggtgagcaaaatgacagtttaaaattttggctcttttataatttctcttatttctcattttgttacttagattcaatgtcgtttccattcattctaataagaactttggctttccaggaagaaccactagagactcagtgaattagacacagggctatgtgaccctttcttcaggggcacacctgacgttgaactgtacctacagaatgggtaggtaccttcctcttgtggtatgtccaatatcccaaagagatatcaaaatgccttgtctctgaggcatcatgataaatgaaaaggaagatttcaggcccattaagttaagattaaaacctctttccacttgcagaaaacctctatccaagcactaggcacaattgtgtacttttatgttcctaatgacacagtaggggagactaacagaggagttgagtgcaaattgcaaggggtatgagaggggctgggtgtgagcagtttctttttcctatccagacagggccctggagtgcaggagtgtatgtgggaagttggacaggcttcgtgatttgctatcccaggttaagtagcacatgagactgcatcttagaaatggggaaaggaaagatttgtcaaaacattgcccatatctgtcctctaattatagctcactgatcaaaactacaagcctagtaatgtaacgaaggaaagttctttgacatcagttatttaaaatatgtacaatgtgattttctgaaatacctttgtatttaaaatgtaatttaaattacccttaaaattaaaataaatcaataactgttttagtccattttgtgctgctataatagaatacctgagaatgtgtaatttatgaagaacagagacttatttcttacagttttggaagatgggaaatccaaggtccaggggcctgcatctggggagggccttcttgctgcaccatactatggccaaaggcagagggcaaaagagtgcatgcaagagggagaaacggataaagtgccaaactcattcttttatcaggaacccactcccaagatatctaacccactcccatgataatgtcattaatctattcatgaggacagagccctcatgaccttttaaaggtcccacctctcaacactgttgcattggggattaaatttccaacatatgaactttggggggcacattcaaaccataacaataataaaacattaatattcctggggaaaatgagcaattcacaaaaagtagtacaaatggccactttataaagaggtatataaattctttagtcatcaaagaaacatttaaaaaagtgattcattttttccagctatcaaaatagtgaaggttactgacacacacacacacacacacacacacacacacacacacacatatcatggaatttttttctgttactccaagaacctcctatggcaccatgagtcttgagccatttactatgtaaccagaaataaagactgcaaatactcaactgtaagccaagccacttctagtctaagtgcaagattgcatatttgaagagaaatatttccatttctgagaaaccagataaaattatgccaggactgaggaagaaaaaaagagaaaaaaaaaaagagcagtcaggaaaaaaaaagcagtcaaaaaaaaaaaaaagaacaaagttaagtagactttgcaaaatgacttcaattgaattacaccatcattatcaaataaatcttcaagtccagataaaaaaggaataagtgtaccctcagcactacccttttctagaagagagaaccaaaaatatcttgattcactaccgttttcagtgaagaatattgcaaatgtgaaagatggtaataacaggagcaatcaaacaatagacagtcctgagaggttactgctcttttactgtaaagctaaactttgaaatgtgaatgctaagtctttgttaacacaattataataataattacattttagatagaatttcatatttattcttgcattgttgaagttaattctattttttgatattcagattcagctttagcttcccccagatattgactttaacatctcaccattcggcatttggtcacaatgtgtgttcagtggaccatgttttaaggaaataattagacgtatgaagagggtttatgtaagcatagatttatcacaatgttgtttgtaaaaactgaaaatattgaaacaactgtctaaaatactgacatgttgtgatgtctaagttctagtggaaattattctcccttagaataagtgttgtagcgataacagacttaggagtgtggtgagtcccctttgcacaaaaagaccacctcacacccaacatgactcttaagaatgaggacagtagtgaggacacactgcagaacactgagaggcagatgacgtcttataacctgttcattaacttgccacttgggggtgctattcaccagtgaaatcataatttatgcatgaattctgagtacaactgtgaatcctcacttcaacagtgatgccctctgctaggccagagacactaacaatgaactcctctctggactttctaattctgatcttaatgtttggtaagtacattttattaaaattttttgtattatttcaaaataataaatacttctccaaaagatacaacaactctggccaaacccataaaatcagtacttttttccccctacaggaggaaccagcagcaattcagtcaagcagacgggccaaataaccgtctcggagggagcatctgtgactatgaactgcacatacacatccacggggtaccctacccttttctggtatgtggaataccccagcaaacctctgcagcttcttcagagagagacaatggaaaacagcaaaaacttcggaggcggaaatattaaagacaaaaactcccccattgtgaaatattcagtccaggtatcagactcagccgtgtactactgtcttctgggagacactgtgttaaaagcacagtgggagctatacaaaaacctcaaaggctcagaggaagtatgtagtgaggctggaaaacccaggttgtagagccctgttctctctttcacagacagtcctgttaagacattattagaagataaggaaaatcaaaatcagatataactgcctctaattccagggggcacaggggtttctttgacagaaaatggggtcagggaagagggtctcagatgatatccctgctctcaattaggtcagttctctcttgtccttcaggctttcttgcatgatgtgtaggaattagaatatgatgacttggatgtcagtcctggctctactacttattagctatgcaaatttggccaagttaattgatgtctcagagctttagtttttttcacttgtgaagtagaaataaaaataatcacacaaatttagcatggagataaagtggaaaaaaggtaggttaggaaggggcagattagtactcaaagcatttctggaacttgcaagtcccaccgtagcagttctgctctctcacagcaatctctctgcctagtgctgaccatcctaacagggcttggcatgcccactgctttgtcacaccacaccacaccccacgccacgcccagccccaggccattatgatcaacatatcatcttttctctcacaggctcctactgacactacacacaaaaattaactcaaagtggatcatagacctaaatgtaaaaactaaaattgtaaaacccttagaagaaaacatagcagtaaattttcatgatcttgggttaagcactgatttcttagatgtgacaccaaaagcacaagcaataaaatagaacattgataagttggacttcaacaaaattaaacttgtttatgcttcaaaggacaccatcaagaaaatgaaatgataacccacagaatgggagaaaacatttgcaaatcatatgtactatgtacccgatgataagggacttgtatttagaatatataaggaacttttacaactcaataataaaaagaaatataactcaagcagtgagcaaaatatttaaatagacatttcttcaacaaagatacaagaatgtctaatatgcatatgaaaagttactcatgattagtcatgagacaaatgcaaatcaaaatcacaagatatcacttcgcaaaagtaaaaggctatgactttttaaaaaggacaataatgagtcttatcaaggatgtgagaaattagaaccctcatacattgttggtggggatgtaaaatgatgctatcactttggcaaacagtttggcagcacctcaaaatgtgaaacatagaattagcatatgacccagcaattccagcccgatgtatctacccacaatgcatatgtccccacaaaaacctgtgcatgaatgttcataacagcattgtttatggtagtcaaaagtgtaagtaatccaaatggacaaaccagatgtggtatctctatacaatggaatattattcagccataaaaaggaataaagtactgacacctactacaacatgaagaatcttgaaaacattatgctaagtggaaaaatccagacacaaaatggccatattgtgtatttcatttatatgaaataccaagaataggcaaatccaaagtcagaaagcagtgtggctgccagaagctgaaagaagtggggagtggggagggactacttaatagatgtgtggggtttcttttggggaaaatattctgaactagatagtggtgatggttgcgcaacattgtgaatacactaaaagctaccatattatatactctaaagtgattaaaagtatgaattttatgttgtgtgacttttacctcaataaaaaagaagacaaccaaaaaatctaaatgtgattcttaatgggacaagaagctctaaaaaaattaaattcttactattccattgcaaacaattccaataagtatgtgaaatatggagccatctgataaaacctatagcagtacgggaaggtatactaactcagcttttaactaaaaattatacaaatgttgactgacacaaaggcaaaggagaatagcaaagatggcatgagcctttaaggaaatcgttaaaaagtggaaaccttttaatgaatgcagttaaggcttaaagaaaatgtgaagtggaacataaaaagcgttttagaacagtttggagaaatgaagagggtggggtggggaggaaggttaatttacatatcgaggaaaacagaataattttggtagagaataaagaagaggtagggcacttcgacccctggtttcatcctctattcttcatcaaatacaataattttgggccgggcgcagtggctcatccctgtaatcctagcactttgagaggctgaggcaggcatatcacccgaggtcaggagttcgagaccagcctggccaacatggcaaaaaccccatctctactaaaaatacacaaattagctgggggtggcagtgggcacctgtaatcccagctactctggaggctgaggcaggagaattgcttgaacctgggaggcggaggttgcagtgagccaagatcatgccattgtactccagcctgggcaacaagagcaaaactccatctcaaaaaaaaaaaaaaaagaaaagaataattttcaaactggaaatgaagaaatgaaaaattatgacagataaaaagatactaagagagaacttagatgctttgaaaatgatcaattcttctgggtcttttaaactaatccccaacatacaaaaagaatttgcaggcatggttggcaaggcattgggagaattttttgaaaacctatcaggaatgaaggaaatccccaactcaggaacacagaaatagtggatcgatacccagcaaaattctagagcagattattaacagataatgtgtgggctcttagaaaataatgcagtgatcagtaccaagccagaatgagctcactaaagacatttttaaaacaagtcctaaattcaaaggacttccgtggacttcaaacgtgtcaaatatttgcaagatatttaataatttgtttttcactatatcaatgggaaaaatatatatatattatcatttgttgagtgttgtgtttatcacaggccctgttgtactacatatgtaataagaactaacatttatttatcaagggcttaatgtgcatgaagtgttgttctaaatgctttgcatacattaattcacttaatcttcactacaacctcatgaagtaggtgcaatccttattatagataaggaaactatctttaatacagaagaattaactaacttgcccaagaacacagagttagtaagggaagacctggcatacaaatacagtttgacaagcccaaagcctgcattcttaaattctatactttgttacctcccaatgttatctgtaatccccaccacaaaactataattttggtattgttacacccattttatgaataaggagactgaggattggagtattgaatagaaaaatccagtagaatctagtaagtagtaagactaaggctcaaacctaagttcatttggatctagactgtatcctctattcactttgtcattctgcgtaatgctagacttggtgaattctcagctgaaagaacggccatgtataaatatacaatttagaaaaatgtccctattgttacacctcatgattttatccttcactttgacctgttcacattgatcttatgtaaattcacacaaggtatgcccattaaatgtacaaatagcaaattttgagatcggtatatgatgatcatgtcctaatgatctccagctaatatgtttatttacagcataaattaaagattgaaaatcatctgaacaaactggaaagatagactgaaactgtcaaaatagaatttaatggagataactatatatttatacagtagttttataaaaatgagttgtaatgtctggaagaagggatcctgaatttttagtatttgttgtgtaacgcgctcatagtaattaaggaaaagattttctgaaaggatattagaaattctcataaaatcaatttgtgcaaaatacagctaggactcacagaaagaagaaaatcaccaattggctatgctttccgaatctacttttctctggatgtatgatctgttctcctcctgggaaaccagattccactgtaagcctgtcatattctactccacaataacttcagtttgaacatacccagctctgtttgctaagagatgagtctggtttgaatagcacagggctttaaagctctagttacactgtctaactgcggtttctgtacctctagttcaaattaatgagcgtagtatcttcccagatccaataagctattgccagaaaaaggaggttatttggtacaagcatgacctctatgtcatctctttagaaaggaatcccaaaagtggaaaaggactacatgctcaaaataattcaccaatgtgataaaacaactgaaactatcatagataacaataaaacaagtggaaaccagatgagtacagtaatactctgacagggcaacaatatttgaatcacatttgaagagacgtgaacaaactgtagcaagtctaaaaataagaaagataaaactaataaagtagtctgaaataataccatgtgcagaaagaaacaaggatgtcacataaagaaaccagagatatttataaggacacctttacaaaaaagaacagatctggccttgagttttcaaaagatataatgtgaaatgcagctactctacttgatctatcatagctggctgaagtctaacaatcaacaagcttctgttctcccacactaccctcacctttcttctaggactcctagtaggaggatgctaagtttggttctctatctgtattgtgggtgagaggggctgtttgtttgttttagagacagggtcttgctctgttgcccaggctagagtggagtaacatgatcatatctcactgtatcctcaaactcctgggctcaagtatttgacctgcataataaatgtctacgcctcatgccactaggtggcaatgtgggtgttatactgaaaagatcacagatggttcactttgcaagtaaaactgtaaatgttcttaagtgtgcatttctgctgcttctgatgggctgaaaatcccctttgatttctaaagtaaatgtagagacgttttaaaaataaaggactcctttgtccaagatatattccgaaatcctccaacagagacctgtgtgagcttctgctgcagtaataatggtgaagatccggcaatttttgttggctattttgtggcttcagctaagctgtaagttggggagtttcaggacatgagatatttttcaaaattctggggaggggagagaagggactccaagtggctaatctggaggccctcctgaaaatgtgtaaagaaatgtgtataaatattgcaataattgtaatattctgtatctgatgatgtctttgagaacaggtgtaagtgccgccaaaaatgaagtggagcagagtcctcagaacctgactgcccaggaaggagaatttatcacaatcaactgcagttactcggtaggaataagtgccttacactggctgcaacagcatccaggaggaggcattgtttccttgtttatgctgagctcagggaagaagaagcatggaagattaattgccacaataaacatacaggaaaagcacagctccctgcacatcacagcctcccatcccagagactctgccgtctacatctgtgctgtcagacacagtgctccccaggcacctggagcccgtacctaaactctaaagttgaggcatcatttcttactcctgtctttcagacttgtctgtctctatccttggtcagatgatgtaaaatgtttaagtttttaaaatataatattctccccttctagaccatctctcttctctacaacatcatcaccaattatgttaaccagacagtatgtgatttttatcttgaaagtaaaatatacagggtataaaaatcccgattctgctacttattaactggatgatcttgacaaagttacttaacttctctgtgcttcagttttccctcagctataaaaaggaaacagtgttagccatggtacgtaaccccaattgtggggattacatgaggtaatatacacaaagggcttgacacatttcctggcacgtagtgttacataaggggtatcaattattagtattagttttagatgtaccatgagtttgctaatattcactatggattaataccacagatcattggagaagtatgtggaatataaataataagcaccttataataattttagtttttagattctttcctaatgatgtccagcacttggcctttttaatagtgttaagaaaaacagggagtagctgtagaaaacgtaatagaaggatgactctatggtttggtttgtggtgtggaaatgaaagactggtaagagatgtttctgaggaagctcagctgcttctttggaaaaaaggacaggttctaagttttcatgtggagatctctaatggaaacttgcatttgtggaaattcatgaagcaaaatatcaaacccagtgtatctaaatcaacggttctgtatatcccccaaggattctttacattactattcccaatcccagtggaattcttatatcaaaacaagttttatgattataattgttcttattactcaacaacatcaatcacatatattaaattacagctacattcttttttaaaatcaaaggctttttaaatcaaaatactacctgcacatatctaaaaagccaatagtattataaaggtctgttccttccttagcccatcaagaaaacagaaataccatgctctacccccaccttccaattcaaatccattctagcaatttctaattaatatgtatatactcttgatttatcattattaagcattatctattgacttccttctatggcagcatgcaaatactctcactttctcaacatagttatatatatatcataagctggggttaaatagacagtcagtgcatatatgattatgaccacatgaatattgccactgtccaaccaaaatgacaactatgagtatatatcctttctggtacaacgtattttcttagttaataattacatttttttcatttattctatgtcaatgtgctattttttctaagttcttcaacacagtcttaaaaatatttattaataatttctctcaaatgcttcaagcaccttaatttcttttttttcccctcaagattccctttcctttgacctccattgtttctctgtgtgaactgattgctctataagcataaatgtgattctagacattttagtaccactctcccaagttggcattcttgcattttggatctcatatcttcatttcccaaagacaaatactagagagaaaaaagggagaggaagaagaaggagaaagagaaaggagaaagaaacactcttgggctcacttttgaacaatgagagaaacaaatgaataaatggttcctgccctcccccatgccctgcaggaggaaaagtctgcggcatattccaaaagactcttcagaaggtcatgccaggatcaggcaccagtcatgcacatggtggccagctccattatgcaccattgcattggctctctccactacccaaatttgctctcttgatccctcactcctgctccatgagatcagttcccaaaaatgccctgcatgcaaacctttatctcagtctcagcttttaagggaatgtaagctaagacatgccttttctccctgtgaatagagaggacacggagccagaagacacaaccctgcccgtctgctctcagtagtgcctcatccccttcaaaagccctagatactggcctatgcagctgtcccagggactactgaccacagcttctctatcggtgatacatgttcctggcttcctgtttttaagaagtactggacacacctgtgtcactttcctgaaagaaagagtgctgagattggagggtccaagtggaattacaggctgagacagagagaagatacaggagatgctggccctaacagagagggaaaacaaaacaaaacaaaacaagaaactattcttatgaaataaaataaaaagtctccccatctgagagtccactggtctttcctgaaagccaagtcatttttccatcgaataaatgcacgagtaaaaatcaagaaaacataaacatggataaaagtttcctcatagagttgacaagattattcacagagacagacttcttggtctcaattttctcagcatcctcagagtttactgtgtggacactatgatcacagaaagaatctcaggtgccaaagctagcaattcaagttgtttctggtggaagtcagtgccctcctgtagtcaaatgaatgaactagtagaaaccactgctttggtcagtttcccctctcctgtatctggccttcagcacctcagtagatgcttagagagcacttaccaggcaccagctcccagttgatatgggaaccattagaactctctccagagaaactcagtctggcccagtgtttctgacttcaagcctcatttccatgaatcaggtagctggtgaaattgatagactgcaaactccatgagggcaggaaccatgccttggtcattacagtgtccccagtacttagcatagtgcctggagccaggagcgttctcaatgatctacgctgctttgtcatctgctctgataatgagagtttcttgatgtcaagggctgtgttttgttcatttttgtatccacaaagggattagcactgtatttaacaatagtagaaactgaagaaaaaaaaattgtgtggaattacatttcctctttttcatcagaagtgacttagtcttgctgactttctttctatgcccttgtgtgttgcctctttgtttgcttacttgatttttttgcctcactgagaatgtaaggtctgtgaggacatcggcttgtgtttcttcatccctgatatttcttttgcaaccagcccaattctgatatctagaaggaggtcaagaagtggtttttggaagaataagtgaatgtaatagttatttcggacttgtgttaaaaggcctctttgcacgatttagtagaaaaagcactggagtcttagtcccggttttgcagctaacagggtaatgtaattctgaagtcacatccccactttcggcttcagtttataacctggaaaattaggataataatacacactctacctttatcaaaaaaaatcacgatctaatctgaattagatcatgaaaatgaataccttttaaaaagtgaaaaattttaaacaaacaaaaattaatattattaaggaattttatatatatatatggaattaaatggacaagaaatattatcctaatatactccaagacaatagttttcactcccatacttatccgcactgctatacaattcagtcagtgccaaatcactacccacacacctggttgtccttattactgtggctttgcaaccttcccatcactcagcttatctaaatattctcctgtatctaaaaccagtttttagaatctccaaagagcttgttttccaacatcccccagaaacatgcatttctcaccttactgagccaaactattccccagtgttcatcctctctccaagaaaagtttttattcatttggtcattggtcaacatttttctcagctgtctatttctcaaaatgtatgttctattctactattttcttaaactaatgctattttcaccactggccaaactttgtatttgaatttgaatcttatttgaattttacattctactttggccatatctttgtaatcagaaataccagtgatagtactcaccattcggtgtacaaagtatataaaatagacatgctccatatctattaagtgatgaaaattttctaggtgattttattataaaattaaacatttttagaagaaaatgcttctttagtagattgagaagaaaatattccaggcaatgaccaacccagtgatgtcatcttactgtatatataaatattcatacttgattactactataatcaactacaatgtaaacatttcttttgaagtgctaatcggtatgaaatattctcttcaacctcagattaaatattcaccctcagtccccctcatttcccctgaaatacaatgacattaaattgcctgatctttgcattttctgatttattttatttttatttattttcctttgaggtgggctgggtacttgcaatggctaatagtgcagagctgcaattctaggcactatcagcaggtgttttaactaacacattatgtggattatttaaaaacttaatttaaggtatatgataatatagtactgctttgtatttttacaaactcatatttttttttttttttttttttgagacggagtctcgctctgtcgcccaggctggagtgcagtggcgggatctcggctcactgcaagctccgcctcccgggttcacgccattctcctgcctcagcctcccaagtagttgggactacaggcgcccgccactacgcccggctaattttttgtatttttagtagagacggggtttcaccgttttagccgggatggtctcgatctcctgacctcgtgatctgcccgcctcggcctcccaaagtgctgggattacaggcgtgagccaccgcgcccggcctacaagctcatattttaaagctccattcttagctcagagctgagccattaaagttcaataatgtaagacagcaagaatgctaaagcttgatgctaaacctattcagtaatatggaacagcatttgagatcaggaaggaggtggtcccacaactgggaattaaaatcaaaatggatttgagcagataaagctgcatgtccaaaggaagttggtgggaaaacttgaatctgccaggaattttctgctagatttactgcagatcctgccagattcaagccaagcatagaaaaataagcagaaaacctccttcatcactgcctgtgaaagaatgttgagtccaagagacgagtagagaaagacctctatagattaggacccattaatatacactgacttggcaaaccgagacctagaggcaagtacagaccacaggaccaccagatgatttactaccttggatcctactggtggcaaaagctgctcccagggtccacttccctgtacagaaaactacctcatagaaactgaaaattatatggcaatatacatcaaagagtccttgcactctgaccctgtaatttcacttctagaaatttcttctttcttaaaaaaacaatcaagtatgtacaaagattcattttttaaatgttggtgagagctttatttaaatgagtggagaaggaaaagaaaccccaatgtctcacaaaggagttgatttaaaaactgggggcacattggatataaccaataaaaatcattttatctaaacttctgcttccagccacgccgaaataacagggaccagatttaccattccacttgaaacaacagcaactgagaaggctgcagacaaatgacataaatcaacaatttccaaaacacggtatactaagcaataaatgaccatgatcctgagagatgggaaacaaatgaggcgagccctaacattgcaatagcttattgccttgagagagtttctaggccacagcacaaagaggggaaactgaggcagaacctggtaggctccctgaattgaggcaacagatctgagacagagaagactaaggcagctgaagttcataagacagaatacacgagaggagagaggggcacagagaggacctagagatctgccgagggtgccctcaagtattcagcagaatgctcatctgcgcacgcatgtggaatctacccgagggtgggtggcggcagcagggaataaccattcaaaaagattaaaggaaagaggacctcttcaagtatgtctagaatttagaaaagagtttattgcttagccatatatttcttaattctttaattaatatttcatacatttcattttctctggctctagtcacttatcactgtggtccattttcaaacaaagaatcatttcacatattgaggaaacaatatatgaatagcctgtctggcttagataaagagtaaaggcaagagaccaggtgcggtggctcacgtctgtaattctggtcctttaggaggcagaggtgggcagattacctgaggtcagaagtttgagaccagcttgaccaacatgatgaaaccctgtctctactaaaactacaaagaagtagttgggtgtggtggcacatgcctgtaattgcagctattccagaggctgaggcaggagaatcacttgatcatgggaggcggaagttgcagtgagtggagatcacgtcactgcactccagcctgagcaacagagcaagacttcatctcaaaaaaaaaagtaaagacaagaataagtatcacccatatggcatgaccaaagtttttggtaaacctagggttttttttctgttgtcagtaataaaattgcccttaaaaactagtttttatttctcattcctgaactcatttacatataatgtcgaagtatgataaattcaaactatgctgacacctgtacgaatgtggcttagtatgatataaagtctttatactttcaccaacttcaaacctcagtttctactgttataaagttcatttcactctctcttgtgaccatttaaatactttcacatatttcatcgcatttttcatcttctagggctgaggactcctaattcttaagaatatttctgttatccctataattactgtcgtgtctctccaggcattcttttttagtgaacagttgtcattaatcacttccagaaaggattcaaacaccatctctacatttatccttccaagtgctgtgactattgccttgcgaactacattttccaggctcccttgcagctaaggtgcagatctgtattcagccaagtatttgattgggagatgagccatatgaggaacaggttaggcaggggcatcccttttcttggtttaggggcagtggaggccatgtggtctgggttaggcagcaacagcatcttcttgattgggccaggagcagtaacttcctgtttgggcccatttggctgcatattctgttgctggcagcactggaggcagctggcatagggataggactgcagccttcttatgaggctgatggatgggtggttctgggcatcactcctggaagtcgagcctagaatctttttctccagtctgcccaatgattctatgagccttctgcctccccaaatcctgatctgcttacactaggtaaagcgatttcctttctttcttgtcccttagcacacagatatctcacagtgtttagtctgagacccaccacagctttcattccagcatcctttaagctgagtatcagacctggttcactttttcactgcagtacacttggctcattccaatgaggatgacttcatgtttatagtgatttctggttcctttgcttggaaatcctaaaagatagaaaagagtctccagttgctgcagacgcaggcatgagatataccgaaaactctccaaaattgtctcttggaatgtttcttcattacttcactaggtttctttctaaccttcagagctagtaaggaccttggattaaaagggccattgaatttctagtttagttaagaaatattttcctcatttcatgggaggggggaagcagtgcagactaaactcagagcccacatcatgttgttcttaccagttcaaatcaaatcacggtttccagtcacttggctaatatttatccttctttaaatcttgatgaaatgtctcttcctcaatgaacacttctctgcccctcaacctaaatttgttcccctcgtgttactgttttaaagaaccctgtaatttctatgtatttctgtgtgattatttgtataatatctgtccttcctattaacctctaagttccactaaatgctctgtgttcagaatagtgcctggcacaaaggagtatgacaaatagtgatgagtgaatgaatctgagccatcagacatgtatcttactttgtgctgggctgtccctcaagtgtagatgttcctagtgacaatcccattaattcaaacactgactggagaggattgaaaacatatgaagcagtgcttttggaactgaggctgtagtccaatatgactggagataaaaaatgaagactttaaaaacagaattcacataaaagcaggtatcaacatggaaaactgcagaggatgcctgtatacacagtgggcacagcagcagcattagaccaatcacctccaaacttgaggttccaggctgaggtgacagatcagagtgaaccaggcaccgtagaacaatgggaacacttagattcctgacactggaatttgctgattcttctactaacgtgtagcaagaaatttagccttacccaaagtcaggtctggtctttgtcccagttcctgggagataacctctgaaggctcggaatttcctgaattgttggcatgtctttataattgatggtggggtccttggaccacacttaatagtttctgctatcaagatgactcattgtgaggctggccacaatcaatggtctcaggatgggggctggccatgccagaaagaccaaccatataacatagggtggagggtttgtgtcacaacctagagagtgagttcaaccacacaggctatcagtcatctgatataatgaagccccaataaaaactctggacaccaaagctcagctgagttttccagactggcaatattccatgggtattgtcacgccttgatgctgggagggtaactcatccctgaggacagtggaagtttcacgtttggaaccctaccagactctgccctatgcatctcatcccttggctgcttttaatgtatcctttctctgtaataaacgaatcacaagtatactaggtttcaatgagttctatgagtctttctagtgaattatggaacctgatttaggaaatacccaaccttgccattggtgccagtagtgagagtggtcttgcatgaacttatctcccctttgtagttgagtcctagcgacttacagttgggggcagaagtcttatgtagatttagtctggaggtctatgaccttaaccttgcagtttggctaactctgggtagctacattttgtattgagcaactctatatgaataaaagaagttttgttcatataatgccttaacagtgaatcaagtatatcaagaaagttttttaaaagttaaaagtaggcaagtctactggtaataaagtaggcaagtcacaaggtaattaaatgcctacgtttcaatgattacacatgttgcttagaacatacacatatatgagatcatcacgttaaaatatttctaacacacaggctggcaacacctaacaataataataattagtaattgtctagttcttactactaactggtttctgttctgagtgttctacatatattaactaatttaattctcataagaactctggttattagccaggtttgtagaagctgaggcacaaggaggttaaatacttcgccctatggcacactcccaaaatttgaatccaaaccatccaactccatagctcatgctcttaaccaatgccccatacagcttctcagaaggcaatcacttgaaatttctctctgatcttatagaaaggtgttagtagactggttatcttaacgtccaatcccaatcatctttgtagcaaagtaatatttttatatgaacatgtcagaggcatttgaaccagagcaactccatcttgaataggggctgggtaaaatgaggctgaggcctactgggctgcattcccaggaggctaatgcattcttggtcacaggatgagataggaggttgacacaagatacaggtaataaagaccttgctgataaaacaggttgcagtaaagaagcctgctaaaatccaccaaaaccaagatggcgacaagagtgacctctggtcatccttattgctacactcccaccagtgccacgacagtttacaaataccatggcaatgtcaggaagttaccctatctaaaaaggggaggcatgaataatctaccccttgtttagcatataatcaagaaataaccataaaaatgggcaatcagcagccctcaaggatgctctgtctatggagtagccatacttttattcctctagtttcttaataaactttctttcactttactatatggactcaccctgaattctttcttgcgtgagatccaagaaccctctcttagggtctggattgggacccctttccagcaacaaagagatgtgtattttatttctgaaaatacttttttgctttgttatcattctcatgttaggccagcagctcaggaagtcctggtctccttcctatattggaaaagggagttcacaatgaacacaaaagaagaaaggataaatttgaaaattcctctggagacaatagaatggaaaaaaggggttttgagtttgggttacgacttttgagtttaaaaataaatctatgcctcaaaaagttctcttagaatatatctgaatacaaaaaccaattatgcaaccctagatttaatgcaaatttcttagtttctgggaatttctggggtgatggagacaaaagcaagaaagtaagacatcagtgaagatctctgcccatctccacataccctcccagcagtggggtgggaggaggcaatttttagcccccaaataggatgttaggaatctgaaactagaggagattgacaactaattcctctcagaaagactgagtgacagtatcctgcaaatttccaccagggcagagacagctgtgcagtagtgccaataggcccagagagcccaagacagccccattctgccagactggaattagagtagttgaatttttgcatgcacacaaaaagcatagaaattaacagagagagacttagtggacctggatgggtgtcaatattataataaaaaggatgcagagcatatagattaacagccagagacctacagggactcagacatcaggacattagaaacaataatgtcccagactggaccctaagcactgcaccccaacagatgccagtatgggccaggtgtccccaaccaatgccagaccaccagttaaggcctctacattccaccccaaggatggcgaggaggaaatctgaactgatggaagacatcctgaattgacttagaaagtcatgattttactgagaaaaccctgtatttacttaaagcaagctttctgacaccacgcaaagtggttaccagagttagaaattaggctgttatagaaaataaagctatcctggattgaacatctgagtaaattacaaaacatttacccgctacatctctattcaccagatagcgaactcaagcattcctctgcccctacataaatgacaaatgacattcacgtgtattacatatcccctcaggcctaactagggctgtgtgctgtttccaagaccaaaatgtcacaactgtaaaccactcacctggatacttgctataagaaatagcttggattagtatggaacttggtgtaaccctcaaatatgggagtttgtcactagaggtaccagaggaccacattctctgttaggggacctcgatgacagtatattacaatgaaggcagtgactggcaaacagcagcttcaaataggcatgcaaacaaacattgagaaacagtaagcacataagataactcatttagacacttttatatgcagcatgtataggatttaaaataacattcccaagttaaactgaaaccattactatgtaaatgccacagccaagtcaaatgaaatagtaaataccagccttgcaaattggtctccctcaagggcactcaaaagagttagactgcgtgctgctgccttaggaaatgtcctcctctctatcaatcatttctgctttgacatcaaacccattgaccagcatatgttttggaatttctgaacaactgactttcaaggattcacattcattctgcactttcttagaaacctcacaggagccactgttgccaataaaataaaataaaaaaacacaaacattataaatctaaccccaaaatgggattgcttcaaaagagaatggacaccccactccctacattgcttgtacacatctgtgttgattctcttggtgaactggcccatgcaagcaggagctcatcaatcagcagttgtcaccaagtgcaagtcagaattgctcaacagaaaaattgagtctttttttattccctattgtcacctactaaaatgtaagttgcttgttgatctcatcacactgagctatgtttcagggaagtgttgaaaaggcccagcctgcgcatattcttgaaattttgaaataatggctcagtgaacagatgtatactttctcccaatggctctttgtggaaatgaattttttatgagcccaaagtatctttgattcatccctgattaaaagtcaggttaaaactaaataccatatactttttgaaagacattttaggaagttattgacacaaggacttttgagactgaaaatcatgggttaacaataaacctttgtttggtgaaacaaaagaacagtacaggacagaggtgaaaagcacaggctccagggccagagtccctgggctcagattcttcacatttcagctctgtaaccttgaacaaactactccagttaatcataacttcagtcttttttaaaaaatgggatattaaataatgggtattaaataatagggttgccatagaggaaaatataaggtaatatttatatgcacataaaacagtgcctggcacagagccagtgttcaattagtactagctattttttggatacatgtagataaaagaagcatttaatgaatagttacatgcccattaacataaaatgtaagccacttccatattctgtagcttatggtgacaaagttttctgctcacgtattaactaaaaggagcgaagagcttccctataatattgaaaattttatcctaatggttccaaaggactgttttctaggaatgtttgctacagaaacctcactggttagatgtttgttggagcacactgtgattattcattgtcactgcaaactgtgtttaccacgggaggctgttctgactcaccactttgtgactcaccgattagtaaacagctaaatgtcgcattgctgatttaggtgtaatttactgcgtcaatataaaaggactctgcagattctactaaaatcaagaacatagctaaaggcattcttcatcgtaaaaacgaattttagaaaacaagatgactctaacagagttactttaaaatacaatgcaatatgtctattttaaatgacaacaatatctcctgtctgacagcattcaacttactttcagatttattcggtgttttctcaacttcacgagaaattgaaaatccataaaggagggaaatatgtcttgtttcattttcaatagttatatcaagaatacttttcaaaagtatttcatatttaccatgttttcagcaagtaactcttaacaatactctgagagtatgatcgtgatgataggtaaaaatcaggatcactcccttttcatctttacctgtgtagagcaatgtaatgtgcccttttcccaaaccctctgactccatgagggatgagacacagagggtgtggctgagggctcctaggaccgggactccttggctgatgtcctgtggcctgcagtccagggcttgcaggtgatcaaacaggaaaggagaaatgagggaggcacagtgctacgagcaggcctgtgttttcactgggaatggtggttagcagatgctcagatgtgtctcttctccctcacactcacctttggcttggctcttaactcctgcccacccctccctaaactctctgtggaggtccggaactaagcgagtcacagacacccagcaagcagtctccagagaggcctctgtgcatgaagacttccccagaaggatgcccactcttcctacctggcctgggaactcaaaatggacacaaaaactgaagactgtgagagagggtcagcttacaggccagaaactgacaataagattgatgttcaaatagctgaattattgattcttatcctgagatccactcctcattttcagtcttgcgataaaccttagtgaggggtgttttgtcttgtgttctatctattggtggatggattccaacttttctgaatatggggacgtaatttttaaagccaaaaattttgcagatagtaatggatttttaacatccattgattaacaaagtactatgaaaacagtaacacttttaaataaatttgctttcagtttttttaactaaacataatacatgcatgtatatatttaaacttatcacactgcctggcacagtgaaagcactcaaaaaatattagctataattactcctattgctgttgtttactcaatcataggtaatgcctggtatacatgtggattcttagagtccttatagaacacagcagcacataaactatactaggctctaaatcttctctcccaagaacttcatctgatgcatatttcaccagcaacagcagcatttagcactgtcttgctgtagaaaaattcttgataaattaattgaattaaatttatgtcacataaaatgtcatgaagagatggaagtgtcttggtcctgtatcttagcattttcaaacctctccattgtttttttttaatgtatagatttcacctgtgtaaaaattaaaaataagaaaactgatcctaatgctcttcatgaaaggcaagaaaagccttcttggaaagcaatagttatgggagagttctgccagaatttgttctcagaatgacatgagaacaattttattctaggaaatagaggtgctgaggactcagcttctgacctaccctagatcataaacatcactgcactaacagccaattaagaataatctaagctcttgtccttttataacagacctggttatgtcctaaaaaataagagcatttataaataaagaagaaagtttaacagttcaatagatcaacgtgactttccagctcctctctgaacaggtgacatctatttccccatcccttgaatctcagttggccttgtaacttatgtggatcaatagaatgtggccgaagtgacagctgtgcaagttctgagccctcacctcaagagcctttgcactctgtcacctgctctctcagacctcggcttttttccacgtgaataaaccgaggctaaccttctggaagaaaagagaccatatgaaacagaaccacatcagcctgaggccctggacatgtgcgaaaactgaagatcagcaaagctgacctgaaactgagtcacagttgacctcagatgcatgagaatctaaccaaggctgaaaacatttggttgaatcccacctcaatttctgacccagagatagcaactaatgtacaatatcatgattgttatgcagtcattagaaagaatatattagataaatgtgtattggcctggaaaaggtatcatctaagtatgcttaatgattatccatcttaaaaaaaaaaatacagaaatagggttgtagaacaagggtcctggtcatactgagcttacacttctgttgatgaaataaaacacatatgagatgatgaggaaataattcaaccaacaagaaaatactttacaaccaagagacttattaaataaaatgggtgcaccttttataataccaataagtataatagtaccctaacacagtagacacatttctgttgtctgtagttatctttcagaaagccgtcttgggagaacctttaaatgacctcagagagcgaaggtttatgtaaataaagaattaagtcagtgtgggtagaggttcagcaccagggtgcaggaagttatgtgaagattgtggtatggggctcatgtctagaaacagagagtggccccatgtcagcctatgagggaggagccaggccccacctcaagggtctccttcaggaagatctctgtgggaaaggagcaggggttccaggttttcagcaaagcctgtgcttgggcaatccatcaacacggttagtccagggcccacatataacctctgacccttctcacatttattttctctgtctggtacttcctctaaggagcatcctgccactcaccagcccctaccaaacacacacacacacacacacacacacacacacactcatactctatttgctcataatctcataatcatccatcaggttttaactgagatagtacttcttctgggaactttctctggtgagagatcctcttatgtggctcttgacctaccaaaccagaagcagttgtgcaattagtgatcattattctcttatttattatagtatctccagcacttagcacaatatctgcagacagtgggcacgcactgaaaaaaaaatactttttgaatcaatgaattaaatagctagttttcattcaccctaagaaaataccaaacattggtcttaagaatgtcacaggcctgaaggtataaaggaggaagcaaggaaacaaaatcaacagacagagccttggcaaaatctgctgttcaccagtcctcccagcaaatccatttcccattctggggaagcaatgccaaacagctccaggaactctgtacatggtctgtcaagtatccaagacagaagggagacttttcaagagtggaagcccagcctgcttgctccagtctggactgtgctggtctgtattttcctagtcagggatggccccaacctgggactgtgtctcctctcaggctctgaggccttgggaatggaggaatgtcgtatctgccagtggtttaggtctgtattgtgaagaattaactttcccaaacagagatctggccttcaccctcagctgctgggtggtgattcctaggctcctggattgtcctgccagataggagaatctttgtttgcctgagggctttggccaccagtcagtctaataacgtgatatatgatggggctttggaacatgccatgtgaattctgacctctggaggaaccagagatcattagctagaacctccaggaggggctggaggttaaaggtcagccacgtgggcagcgtgtgataaagctccaggaaaaactctggacaccaaaggctcagttgagctcctatcttctgcaacactccatgagttctgtcacacaacatggctgggaggaggtaacacacccaggtctccctgggagaggacaaccagaagcttcatgtttagaaccctcccagatttcacccaatgcttctctccctttggttggttctgatttgtacccttttgctctaataaactatgatcatgatcactttcctgagttttgtgtgttgtttcatggaactatcaagcctgagggagcatgggaactcccagatttgtagccagctagccaggagtaaaggcagcctggggacccggaacttgtggctgatgtttgcattgagggcagtcctgtggaggactgtgcccttaacctgtgaagcatggccacctcccggcagttgctgtgagaactcattgcagggccactcagggaagtgtgggaaattgaaccaatgatgcctgacaccacggcttcctgactatcctctaggaagtctatcaggagatgcccctgttcacttccctgtaggttccagcgaggctcagagggtcatcagttctaccaacaatatctgcgcagaagagagtagctgtgattttattttagtctgaaagaacactgtttgttgttgattaacacctaaatattacaaacagtctctcagtgtgagaagatttatcttattctcctgtgtaattagaatgattattcaacaaatggatgttatctagcgaacttccagaaagaagccaaatttatcaacctcaccaactcacacatacagccagggatctatattcttgtgctctcagagaaggcatggagcttggactgacagcaaaagaccaacaaaacacccagaagccagtcaaaaatggcccaggctgcaggatccttgaaagacctgaaaacacacgaggaaaaggctgggaaatagtaatggtgagtggacctctgcggtctggagaggaaactactggttattttaggaaaaacattcccataatggggctcagggaaaaaagaaagtaatggtatccaggccttattctcagaagcattctcctccctgaatccagtatctgaggtaactgagcagcagataaaaatagcattttctcgaaacaaagcaaaacattaaaaaaaaaatagcctactgtctaagcttgtctcccagtggaactcaggaaccaagccagcttctccagctgtgcaccttggctgtgtgtctcagatggaacatttctgacttcattccctcctcctcccacgtcactcggtaaggagggtgggccaggacaagcagctcagacagctgttcctacagctggccttaccacaatcccccaggcctcacatacatgcacctctgggccctgcctgcctgcactaaaccatccggcccagtgcaacagaccattctttcaagctgtctctctcctactcacaaccatcccaggagtcctcttaaaactattttttcggagaacacattgtgctttgccacactgttccatttatctcttggtggccattccatttgcctcagcaactctctatcccattttttagtactacccctgaacgagaaggcaatcttgttcatcttgccaactctaaatccttatcgcaatcgtgttgctttagattgcattcatgtgtgaataggtgtggataggtgtttggcactgtgttagatgccaaagatacagtgctaaggaaaaaacatacctgacaacagattttattatattccaacgggaaagataggataaacagatacataaacaatgtatatgcagattaggatgagtatcatgaaagcaataaataagaggctgacgggttcaatttaagtggggtggccagaaaatgcttttccttcttctgagagaagtgagcgaggggcacagagaagtccgaattgttacactaatgaatatttctgagcttgaaaacacaaaacaaggggagatgaggttccactcaacagaggtatatacacatcaattacatgacccagaaaacctgattcagacacaccttgctgacactactccatagggaaggtcattttcacttgtccacatctaccacacctccattttcactctccctgagataaaaggatgtgcatttacactgtgtctgcctagcgaaattgtaccccccgctgaataaagcacagttagttgagattcacgaacaccaagcctctctttataatgactttagagagctgtgctaactgaccagcactctggatacttatgagcagatgtctggtagcaatggaacctctcatgaccacccaggctctaaatgactgttcagctcagcagctcattatcaccttcctggagttagagctccaacataagaataaatatctccatctagtattatcactttttaaatcaaaatctatattcagcttgagagtataaatatcaaaatttcagggcattttttctaacttttcttgggagattttagtaaaattccagggcagattgctgaaagtacaatctgggaacagaaactaatatagtgtcacatcatatgaagttaacctctttttcttatgcaattctatcaaacttcaaggaaattctttggaaatctgagccccactacatttaaaacaaaataggtctatcatgaaatgcctaataaaggttgatcttacagtgtgatcgaggtgctatgcagatctgagacaggtggattattccagaatgagaaagaaacacaggatgaataagtcgcactaatggcaatagcaacttctgggaaacaccaatttctggcagctgttgctttcgtcaacactttctcagcaaaattgccacagccatttctgagagcttagaagcactgctaggaatctctaataggagtctgtttaatgggaattcctattgactacagccgcttttgcatataggagataatgttgagctaagggaatctttcaatgattcattcaaaacatgtttatccaccatgtgataaacattatagtcagtgccatagtataaacttgaataatgcataatccctgcccccagggaactcacatccttctcgacatgcctagcacaaacacacagaattataataaaagttgtcaagaagaagatatgggtggcgcattatgcaagcagagaaaaagggactgccttattcatttagaagctactggccctctctagagattgttggtcttccagtacatctaaatattcttcaatcgtaaaatgccatgaagctagaagtacaaaatgctgtattatcagttaagccccctatttttttctttttttttttttttttgagacagagtctcattctgtcacccaggctggagtgcagtggcacgatctcacctcactgcaacctccacctcccaggttcaagcagttctcctgtcttagcctcccgagtagctaggtttacaggtgcatgccaccatacccagctaatttttgtatgattagtagagactgggtttcaccatgttggccaggctggtcttgaggtcttgaactcctgacctcaggtgatccgcccaccttggcctcccaaagtgctgggattatgggattacaggtgtgagccaccatgcccagccagttaagcctcttaaagaatgtcttgaattataacaaacacatgatgcctatcttcccccatatctttatactgacaaaattaggttcaaaatcaaggcatggtcaccagaaatcaggtcagagggatcaagaaaacatggacagtgaagtgatttcacttccatacaggtgataaatatttcctaaaatacaggtagatgtgtggcacaaaacctccagactctgagcatcaaagtccctcctaataccagaaaggaaggacccagcatttgtcatctcagtctcagacaaatacatactcagagggcctcaggaacatatgtaaactaaaaaaaaaaacatgagaaattgagcaggagcctgagtttgggcttccttgggtgggtactgtattaatttcccataacaaaatactatggaatagtacacagatgtttctttcctcacatttttggaggcaggaagtccatgattgaggtgtcagcaggcttggattctcctgaggcttctctccttggcttgtgaatggtcatcttctctctctctctcttcacttggtcttttctctgtgcacaggcatcctttgtatttctccctcttcttataaggacataaatcctactggattaggaccttacccttatgacctcatttaacctcagttaccactttaaaagccatatcttcaaatacagtcacattgggggctagggcttcagcatatgaattttaggaggacagaattcaatccataatagatggggacagggcaattctcttcctaggtaagccttcccttagggccatttacggggagataaacaaaccccaatttctactgagcaaaagctcagagaccctgaagtaactgcagttagtaaatgagaaagacagaatattttcaatatcttcaagtctaatacctagaagtgatagaggtttattcacattttctcccagtcattttcttattctgtgtttatacagcatttctgttaatgacaccattattttcagaaatcaaaatgaaatcttaatgttatcattgactctccccccttccttgccttcacttcaatcataattttccatgtctatgtaagtattcttttggctatttacatattcatcagaaacctatttcagctcttattaattttcatgaagatcactaatggaagccacctattgttcatgcttctagttcaggtgctcctaatatgggaactgtatagtttcagttgatctataacctttcaccccccaggttttgtggttgtttttatatacactttcacacatataagtggtaatgtgttcattgctattatcagttgttcaaagtgggtccctcacccacgaacaggttaaaagccagagctctcctctctcctactacacttgctccttgtaaaaaaaatttaatctttgtgattaacacaattgtttatattcttccccctactcaaatactcccagttacaaacattttaacttgtagtttaaaatcgttcctggtcagcaatcccttctgtagactcttccaaaaattaccatggttcttataatcaatctcacacccaaaagaggagattttagaaaggcatagacaccagaaggcagggatatatctgtctaccacagtccaccgtctggccaccaatgactcacattaccctcacttgcaaaaatacattcacatacatccccaaaggtctcaagaatcttatctcacagagcttcagctcaaagtcaaacttttatgctttaaatcatggctaagttcaaacacagctcctgggcataatatatgaagtacagctcctggggtataacttctctccttctgtcaacctgtaaaactaaagaggcaagtgatctgcccccagtacacccgtcatacaattttgaaacaggcataactggtaggcatgggataacagctatagacatattggttcaaagggaggaggggaaaaagataacaaagagtcgttggtccatagcagttctaaaatctagctgggcaaatgttgggagttcaatgattaggttttagagcctaagattaatctcggctattggggaaaccagcccccagtatttcaacgtaggttcttttctattttccctaagtgtcggccagtctgagaaataaagagaaagagaacaaaaaaaagaaattttacagctgggtctccggggttgacatcacatgtcggcaggttccatgatgccccctgagcctcaaaaccagcacgtttttattatggatttcaaaaggaggggggggtgtatgaatagggtgtgtgtcacagagatcacatatgatcacatgcttcaagggcaataaaatagcacaaggcaaatgggcaggacaaggtcacaaggccagggcaaaattagaattacagatgaggttccctgtcccactgtgcacgtattgtcattgataaacatcttaacaggaaacggggttcaagagcagagaacaggtctgactagaatttcatcaggctggaatttcccaatcctaacaagcctaggggcgctgcaggagaccagggcttatttcataccttatctacaactgcataagacagacactcccagagcagccattttagaggcctccccctgggagtgcattcttttcccagggctgttccttgctgagaaaaagaattcagtgatatttctcttatttgcttttgcaagaagagaaatatgactctgttccacctggccccgcaggcagtcagactttatggttatcttccttgtttcctgaaaatcactgttatcctgttccttttctaggtgcccagatttcatatttttcaaacacacatgctctacaaacaagctgggcagataacacaatcattacaggatcctgaggcgacatacatcctcagtttatgaagatgatgggattaagagattaaagtaaagacaggcataggaaattgtaagagtattgattggggaagtgaaaaatgtccttgaaattgtcaccatttatgttcttctgccatggcttcagccggtccctccgtctggggtccctgacttcccacaacacttggctctaccctcttgcctcttagcaccaccctctatcatccttcttctttaatgtttgcagttgagtagttttatcagcctgcttcctgccagtagaaatgttggggtctgacagcctcctttcatttcattttgtagtctttctatccctttcagtccaagccagtagtgtttctgctgaaataattttctcaagatctttgtgcatctaccatagatttcaatgatgttctgaccatcagaaaaaaacacacccacagatcttttccagacagcatatatttttggctcctgctcggatggctgaggggctacagtttgattgagtggatctaaaaggcacattcttaatctccttaaggagtcctttgtgccattgaatattctcaccttttagtctttgaggtttttttaacttttattttgagttcaggagtacatgtgtaggtttgttataaaggtaaacttgtgtcatggggtttgttgttcagattttttcatcacccaggtattaagcctgggtgtacacattagttatttttcacgatcctctccctcctctcaccctccaccctcaagtaggctccagtgtctgttgttcccctctatgtccatgtgttctgtgttatcatttcgctcccacatataagtgagaaaatgctgtatttggttttctctttctgtgttaatttgctaaggataatgacctccagcttcatcaatgtccctgcaaagggcatgatctcattattttttatggctgtatagtatttcatggtttatatctatcacattttctttatccaatctgccattcctggccatttaggttgattccatgtctttgctattgtgaatagtgctgcaatgaacatatgcatacatgtgtctttatgatagaacgattattattcctttgggtatatacccagtaatgggattgctaagtcaaatggtagttctgtttttaggtctttgaggaacagccatgctgttgctcctaatggttgaactaacttacactcccaccaacagtgtaagtgttcctttttctccacaacctcaccagcacattattttttgactttttaacaatagccattctgactggtgtgagatggtagctcattgtggtttttatttgcatttctctaataatcaggaatgttgagctttttttcatatgcttggtggctgtatgtgtgtcttcttttgaaaagtgtctgttcgtgtcctttgcccactttttaatggatttttttcttgtaaatttgtttaagttccttatagatgctgcatattagacctttgtcagatgcatagtttgcaaatattttctcccattctgtaagttgtctttttagtctgctgatagtttcttttgctgtgcagaagttctttagtttaattagatcccatttgtcaaattttgcttttgttgcaattgcttttgatgtctttgccataaaatctttgcctattcctatgtacagagtggtattgcctaggttgtcttccagggttttttttataattttgggtctttaatccagcttgagttgattttttttgtacatgatgtaaggaaggagtccagtttcaatcatctgtatatggctagccagttatcccagcaccatttattgaatagagagtcttccccattgcttgtttttgccagctttgttgaagatcaggtagttgtagccttatttctgggctctctattctgtttcattggtctatgtgtctgtttctgtaccagtaccacgctgtttttgttagtgtagccctgcagtatactttgaagtcaggtagcatgatgcctccagctttgttctttttgcttaggattgccttggctatttgggctctttttttttccatatcagttttaaaatagtttttctctaattctgtgaagagtgtcattggtagtttgataggaatagcattgaatctataaattgctttgggccgtatggccattttaacaatattgattcttcctgtccctgagcacgggatatttttccatttgtctgtgtcatctctcgtttctttgagcagtgttttgcagttctgcttggagagatctttcacctccctggttagttgcattcctaggtattttattctttttgtggccattgtgaatgggattgggttcctgatttggctctcagcttgactgttattgctgtatagaaatggcagtgatttttttatgttgattttgtatcctgagattttgctgaagttgtttatcagttgaaggagctttggggccaagtctatgggtttttctagatatagaatcatgtcgtctgcaaagaaggataatttgactttctctcttcctatttggatgcaatttaatactttctcttgcttgattgctctagcaatctctttggcctgaaagccccctgaggacaaatacatcagtcaactgtttctttgtttgttgtttgttgtttcttttaaattattctcattacttagcacagatcatgtacaccatgagtgtttaataatatcaatagaatatttgggagcaggaggttattttgcttagttttatgctttcactgttgttatagaacagctgggctagaagacattattaaacataaatacaactggtaaaatatcccagcagaagaaatgctttaaaaatatctccaatcactgcaggagtgcagagaggcaacaactcctccagcttttgcacatcgaataattggtttagttcactccttccacatcacttggagcagcggggagggtggggaaagcttaatgaccaggaaagcctttcataaagtcatcatcaatgttctttataacctaatgtcacttcaatagtccatggttttcaaataaatgtcctacctgcccacagactgaaattttagccaaataaatccataaatttaaacatattgacaatcaaaatggtaaaaagaacttttatttttaacttgtaaaaatggttttagaggtcatcaggaagaataaatgagatacatagccaaaaaaaatttaaatacttgccacatcagatattagaatgtgttctaaagctacgctaattaaaataatgaggtaccaatacaggaataggtaggtagagcaatagaagcattaagtataaacttataagagactcaagttataagttacaagaatttgacatatgttaaagttagcatctcaagccagaacagcatgtcaataaattgttgaaagacacctggataaccatcaggaaaacaattaaattagatccctacctcaacaactaaattccaaaggaaaaagactcataacatttttaattaaaaagcactggaagaatatatagatgaccttttacataactttgaaaaaggagaattatgttataaaaatcacaacaaaggcagaaattataaaagataaaattgacagatttgactaaatacatctttaaacatgtgaatattaaaacgctgtaaaaaattaaaagacaaataaagtagaaattatctaaaatatatatcaaagcaaaaactgcatttctatatgccactggtatataaaaatacttccaaatcagtaaatacaaattgcacacaaatagaaaatgatagaagaagctaacaggcatttcacaaaagaagattataaatgactgataaacacattaaaatgtctattactacataattaaagtaattctgaaaccaataaagtacttttttctgcataattctagggatttatgcttaggaaagaatttgtaataaagatccacacacaaggatatctatcagaatgtagtatataacaccacaaatcataaatgagtcaggtatggtggctcatgcctgtaatcctagaactttgggaggccgaggtgggaggaccacttgcagacaggagcgcaagacctgcctgggcaacataatgagatgctgtctcaaaaattttttaaaaagaaacaatttaggggggcggttccaagatggccaaataggaacagctccagtctgcagctcccagcatgagcgatgcagaagacaggtgatttctgcatttccaactgaggtatcgggttcatctcactggggcttgtaggacactgggtgcaggacagtgggtgcagcctatcgagcatgagccaaagaagggcgaggcattgcctcacccaggaagtgcaaggggtcagggaattcccgttcctagccaagggaagatgtgacagatggcacctggaaaattgggtcactcccaccctaatactgcacttctccaatggtctcagcaaatggcaccccaggagattacatcccgcacctggctcagagggtcccacgcccacggagccttgctcattgctagcacagcagtctgagatcaaactgcaaggctgcagtgaggctgggggaggggtgcctgccattgctgaggcttgagtaggtaaacaaagcagccaggaagcttgatctgggtggagcccaccccagctcaaggaggcctgcctgcctctgtagactccaccttggggggcagggcatagcaaaacaaaaggcagcagaaacctctgcagacttaaatgtccctgtctgacagctttgaagaggatagtggttctcccagcaaggagtttcagatccgagaatggacagactgcctcctcaagtgggtccctgacccccgagtagcctaactgggaggcatccaccagtaggggcagactgacacctcacatggccgggtacccctctgagatgaagcttccagaggaacaagcagcagcaacatttgctgttcagcaatattcactgttctgcagcctccgctgcagatacccaggaaaacagagtatggaatggacctccagcaaagtccaacagacctgcagctgaggatcctcacgttagaaggaaaactaacaaacagaaaggacgtccacaccaaaaccccatctgtacatcaccatcatcaaagaccaaaggtagataaaaccacaaagatggggaaaaaacagagtagaaaagctgaaaattctaaaaatcggagggcctctccccctccaaaggaatgcagctccttgccagcaacagagcaaagctggatggagaatgactttgacgagttgagagaagaaggtttcagatgatcaaacttctctgagctaaaggaggaagtgtgaacccattgtaaagaagctaaaaaccttgaaaaaagattagatgaatggctaactagaataaccagtgtagagaagtccttaaatgacctgatggaactgaaaaccatagcacgagaactacgtgacaaatgcactagcttcagtagccaatttgatcaagtggaagaaagggtatcagtgattgaagatcatgaagtgaagcaagaagagaagtttagagaaaaaagagtaaaaagaaatgaacaaagcctccaagaaatatgggactatgtgaaaagacaaaatctacgtctgattggtgtacgtgaaagtgacagggagaatggaaccaagttggaaaacactctgcaggatactatccaggagaacttccccaacctagcaaggcaggccaacattcaaattcaggaaatacagagaatgccacagagatactcctcaagaagagcaactccaagacacataattgtcagattcaccaaattgaaatgaaggaaaaaatattaagggcagccagagagaaacgtcaggttacccacaaagggaagcccatcagactaacagcagatctctcagcagcaactctacaagccagaagagagtgggggccaatattcaacattcttaaagaaaggaattttcaacccagaatttcatatccagacaaaccaagcttcacaagtgaaggagaaataaaatcctttacagacaagcaaatgctgagagattttgtcaccactagtcctgccctacaagagctcctgaaggaagcactaaacatggaaaggaacaaccagtaccagccactacaaaaacatgccaaatcgtaaagaccatagatgctaggaagaaactgcatcaactaatgagcaaaataaccagctaagaacataatgacaggatcaaattcacacaatattaaccttaaatgtaaatggactaaatgctcaaattaaaagacacagactgtattcaggagacccatgtcacgtgcagagacacacataggctcaaaataaaggaatggaggaagatctaccaagcaaatggaaaacaaaaaaaggcaggggttgcaatcctagtctctgataaaacagactttaaaccaacaaagatcaaaagagacaaagaaggccattacataatggtaaagggatcaattcaacaagaagagctaactatcctaaatatatatgcacccaatacaggagcagccagattcataaagcaagtccttagagacctacaaagagacttggattcccacccaataataatgggagactttaacaccccactgtcaacattagactgatcaatgagacagaaagttaacaaggatatccaggaattgaactcagctctgcaccaagtggacctaatagacatctacagaactctccaccccaaatcaacagaatatacattcttctcagcaacacattgcacttattccaaaattgaccacatagttggaagtaaagcactcctcagcaaatgtaaaagaacagaaattatagcaaactgtctcttagaccacagtgcaatcaaactagaactcaggattaagaaactcactcaaaaccgctcaactacatggaaactgaacaacctgctcctgaatgactactgggtacataacgaaatgaaggcagaaataaagatgttctttgaaaccaacgagaacaaagacacaacatgccagaatctttgggacacacttaaagcagtgtaaagcagtgtgtagagggaaatttatagcaataaatgtccacaagaaaaagcagaaagatctaaaattgacaccctaacatcacaattaaaagaactagaaaagcaagagcaaacacattcaaaagctagcagaaggcaagaaataactaagatcagagcaaaactgaaggagatagagacacaaaaaacccttcaaaaaatcaatgaatccaggagctggttttttgaaaagatcaacaaaattgatagactgctagcaagactaataaagaaaaaaagagagaagaatcaaatagatgcaataaaaaatgataaagaggataccaccaccaatcccacagaaatacaaactaccgtcagagaatactataaacacctctacgcaaataaactagaaaatctagaagaaattgataaattccttgacacatacaccctcccaagactaaaccaggaagaagttgaatccctgaatagaccaataacaggctctgaaattgaggcaataattaatagcctaccaaccaaaaaaagtccaggaccagatggattcacagccaaattctaccagaggcacaaggaggaactggtaccattccttctgaaactattccaataaatagaaaaagaaggaatcctccctaactcattttatgaggccagcgtcatcctgataccaaagcctgacagagacacaacaaaaaaagagaattttagaccaatatccctgatgaacatcgatgcaaaaatcctcaataaaatactggcaaaccgaatccagcagcacatcaaaagcttatccaccatgatcaagtgggcttcatccctgggatgcaaggctggttcaacatacacaaatcaataaatgtaatccagcatataaacagaaccaaagacaaaaaccacatgatttttgtctcaatagatgcagaaaaggcccttgacaaaattcaacagcgcttcatgctaaaaactctcagtaaattaggtattgatgggacatatctcaaaataataagagctatttatgacaaacccacagccagtatcatactgaatgggcaaaaactggaagcattccctttgaaaactggcacaagacagggatgccctctctcaccactcctattcaacacagtgttggaagttctggccagggcaatcaggcaggagaaagaaataaagcatattcaattagaacaagaggaagtcaaattgtccctgtttgcagacgacatgattgtatatctagaaaaccccattgtctcagcccaaaatctccttaagctgataagcaacttcagcaaagtctcaggatacaaaatcaatgtgcaaaaatcacaaacattcttatacaccaataacagacaaacagagagccaaatcatgagtggactcccattcacaattgcttcaaagagaataaaatacctaggaatccaacttacaagggatgtgaaggacctctgcaaggacaactacaaaccactgctcaatgaaataaaagaggacacaaacaaatggaagaacattccgtgctcatggataggaagaatcaatattgtgaaaatggccatactgcccaaggtaatttatagatataatgccattcacatcaagctaccaatgactttcttcacagaattggaaaaaactactttaaagttcatatggaaccaaaaaagagcccacattgccaagacaatcctaagccaaaagaacaaagctggaggcatcacgctacctgacttgaaactatactacaaggctacagtaaccaaaacagcatggtactggtactaaaacagagatatagaccaataacagaacagagccctcagaaataataccacatatctacaaccatctgatctttgacaaacctgacaaaaacaagaaatggggaaaggattccctatttaataaatggtgctgggaaaactggctagccatatgtagaaagctgaaactggatcccttccttacaccttatacaaaaattaattcaagatggattaaagacttaaatattagatctaaaaccataaaaaccctagaagaaaacctaggcaataccattcagggcataggcatgggcaaggacttcatgtctaaaatgccaaaagcaatggcaacaaaaggcaaaattgacaaatgggatctaattaaactaaagagcttctgcacagcaaaagaaactaccatcagagtgaacaggcaacctacagaatgggagaaaatttttgcaatctactcatctgacaaggtctaatatccagaatctacaatgaactcaaacaaatttacaagaaaaaagaacaaacaaccccatcaaaaagtgggcaaaggatatgaacagacatttctcaaaagaagacatttatgcagccaatagacacatgaaagaatgctcatcatcactggccatctgagaaatgcaaatcaaaaccacaatgagataccatctcacaccaattagaatggcgatcattaaaaagtcaggaaaaaacaggtgctggagaggatgtgcactgttggcgggactgtaaactgattcaaccattggggaagacagtgtggcgattcctcaaggatctagaactagaaataccatttgactcagtcatcccattactgggtatatacccaaagcattataaatcatgatgctataaagacacatgcacatgtatgtttattgtggcactattcacaatagcaaaggtttggaaccaacccaaatgtccatcaatgatagactggattaagaaaatgtggcacatatacaccatggaatactatgcagccataaaaaacgatgagttcgtgtgctttttagggacatggatgaagctggaaaccatcattctcagcaaactatcgcagggacaaaaaaccaaagaccgcatgtcctcactcataggtgggaattgaacaatgagaacacttggacacaggaaggggaaggggaacatcacacactgtggcctgttgtggggtggggggaggggagagggatagcattaggagatatacctaatgtaaatgatgagttaatgggtgcagcacaccaacatggcacatgtattcatatgtaacaaacctgcacattgtgcacatgtaccctagaacttaaagtataaaaaaaaatgaaggaaggaaaacaaaaaacgcaaataaataaataaataaataaacagtttaggccgggcacagttgctcacacctgtaatcccagcactctgggaggccgaggtggccagatctcctgaggtcaagagttggagaccagcctggacaacatggcgaaacgctgtctctactaaaaaatacaaaaattagctgggcatggtgtcatgtgcctgtaatcccagctattcaggaggctgaggctggagaatcacttgaactctggaggtagaggttgcagtgagctgagatcatgccactgcactccagcttgggtgacagagcaggaatccatctcaaaaaattaaaatagaaaaataaaaataaaattaaaattaaaaataaacagtttaaacgtccaacactagtgacttggtaaaataaaatttagtacatccacataatgtaatgctattgtcaaatgaagttatttatggatatttgttgacatgaagaaatgtttgtgaatcataatatattagtcagttgaaagaaagttgctgacattataaactgatgtttggctaaattataagtacagatgcacgcatatagtactatgggtatataacagggttagtatatatatatggatatatgtgtatgtgtgtgtgtatatatatatatagtgtgtgtgtatatgtatatatatagtgtatatatatacacacatatatgtgtgtatatatagtgtatatatatagtgtatatatgtgtatatatagtgtatatatatacacacatatgtgtatatatatgtgtatatatatacacatatatgagtgtgtgtgtgtgtgtgtgtgtgtatatatatatatatgctttcttgctctgccagctgaaaagcaataacaccccagtagcaacaagcatggctaggtaccagaactagctttgtaatcccattttccaagaaaataaatcagagctctctggagaaatgtctgattctagggctgggacaaggaatatacaagataggtctggagaaagttacagtgccagaaagtaagcaagtgctcaaaaacaaaggaaaaaactcacaatgatgggagtatgtaaaaaggaggtaagagccaattggaaacgttccgtttggctaaagccaggacaattggagcaataaaataaagtagtactgagtaataatccaaggtgtaaaacaaatatcgtgtgtcaatactgatataaataaatgattgaataaataaatggggagaatagacaaatctcccatgcagaagaattccaaataatttacttggagcataaagtgatagaatgtaactccctcctcaagtgtgggccatacacagtgatgtccttccaaagagcacagtatggaaaggggtaagaaagagcaactttacagtggtaaaatctgacaaacatggcctcagtcaagtgatcaaggttgacgtcaacagtagtaagtcacgttgacagtatgaaccttgatatggtgtgaggagaaatggcatgctacctatggcgtcttcttcccaaaaatgtataacctcagtgtaatcatgaggacatcatcagacaaatcccaattgagggaaattctacaaaatactgaaagggagctctttaaactgttaaggtcatcaaaaacaaggaaactctgagaaattgttacaaccaaaaggagtctaaaaagacaggattaaatgtaatgtggtatcctggctagaattctggaacaaaaaaaaaattaggtaaaattgaagtaaatctaataaagtatgaactttagttaataacaatgtatcgatattggtccattaactatggcatgtgctgctgtaagaagttaataagaagccacactggatagggatttatgagaactctgtgtactctcttcacaacctgcccacaaatccaaactattccaaaattaaatttcttcttttaaaactaagtttcatatgacttgatttttgttaagggaggattacaattttatgtatagctgtgtcattatagatatagctatagacatggatatagatatatagatatatagaaatatagaaaagcatttagctgtgctgtctaatacacagccattacctagatatagctattgaacacttggattgtggctaatccaaattgagaagtgctgtaagtgtgaaatgtacaacagatttcaaagacgtaatatgaagaaaagaatataaacaatatcattaatgttgtgttttgagacagggtctcattcttttgtccaggctgaagtgaagtagtgcgatcacagatcactacagcctcgacctcccaggctcaagcaatcctcccacctcagtctcccaagtagatggaactaaaagtgtgcactgccacacctaatttttccatttttatttattttttatttctaggtttactcaaaaacattattactcaattcataaaatagtaattcagttagctggtgcctaaagactgaaaaaattgtaattttccaggcatttacagtttggggaacaaaaaacatgagacctacttgaaaaaatagaggctaataaataattaaggataaggctctaaaaaataacagtattgcaagctatttttaaagagaaaaatttgatagcaaaatgtttctctgactttgtaaatgcacaagaaagatcaacagttttatcacttgcagaaaaggcaattaatgtaatagaaaatgtgatgataaacttctaagaaactaagtgcttatgtctatttaacaatagaagttttacctattaccatttactattcatgtgtcgacagcaatccccttctctcccaactaggcctttcacaattatggaatatagacataaaatattattcctagatacattttacaaaataaaaatgagtaaatggaaaaaaggcaagttaaagtagttatatatatatattgaaaagtgggtgaataaactgaattactttcactaaaatgactatacaatagttaatgaatttcttatttatacaaggggaaaactggatataatatatctttaacattacacagtcatagaaaaatgttaactttaacctgataaaatcctttccccacatgttttacactttggattttctttcaatgtttattttggatccagagggtacatgttcatgtttgttacatggatgtattgcatggtgctgaggattggggtatggataatcccatcacccaggtagtgagcatagtacccaatgagtaaattgttaccccatgacccaccccaccctctaggagtccccaatgtctattattcccatctttttatccatatgtactcagtgtgtagctctcacttgtaggtgagaacatgtggtatttggttttccattcctgcatatattcacttaggatgataacctccagctgcatccatgttactgattttgttctttttaatggatgtgtagtattccatggtgtatatgtaccacttttttctatccagtgtaccattgatgggcccctaggttgattccatgtcttagctattgtgaacagtgctgcaataagcatatgagtacatgtctctttttggtataatggtttcttttccttggggcatgtacctaggaatgggactgctgggtggaatggtagttctgttacaaattatccaagcagagatctccagactgctttccacagtggctgaactaacttgcattcccaccaacagtgtataaacataccattttctatgtagccttaccagcagttgttatttcttgactttttaataatagccattctgactggtgtgagatggtatctcattgtggttttgatttgtgtttctcttatgattagcaatgatgagcattttttcacatgtttgttgactgcttgtatgtcttcttctaagaggtgtctgttcatgtcttttgcccatttcttaattggattgtttgggttttccttgctgatttgtttaagttatttttcctattcagatgccttttaatttctttctctagcctgattgctctggctaagacattcagtactgaatgttgaataggagtggcaagagtaggcacccttatcttgttccagttctcaaggggaatggttccagcttttaaacattgagtatattgctggctataagtttgtcatagatggctcttgttattttgaagtatgtaccttcaacgcttagttttttgaggatttttatcatgaagcaatgttggattttatcaaaagcttcttctgcatcaactgagatgacatatggttcttgtttttaattatgtttatgtggtgaatcacatttattatttatatatgttgaatgttgaaccaaccttgcagcccatcaataaagcctacttgatcatagcgaattaacttttttatgtcacgctggcttcggtttgctattaacagtattttttttttagatggagtctcactctgttggccaggctggagtgcagtgttgcaatctcagctcactacaacctcagcctcctgggttcaagagattctcctgcctcatggagtacagtggtgcaatctcagctcactacaacctctgcctcctgggttcaagcaattctcccacctcagcctcctgggtagctgggattacaggtgcacaccaccctgcatggctaacttttgtatttttaatagagacagggtttcaccatgttggccaggctagtctcgaacatctgacctcatatgatccacccatctcagcctcccaaagtgctgagattacaggtgtgagccacctcacccagccagcagtttgctagtattttgttcaggatttttgtgtctattttcatcagggatattggcccgaagttttctttttttgttatgtctctgccagattttgttatcaaattaatgctaccttcatagaatgagttaaggagaagcccttcctccttggttttttggaataacttcagtgggattggtaccagttctttatatatctggtagaattcaggggtgaatccatctaatcaagggctttttttgttggtggtggtggttttttttttattactaattcaattttggtacttgttattggtctattcaggctttcactttcttcctggttcaatcttgggagtttgtgtgtttccaggaatttatcgatttcctctaaattttctaatttgtgggcatagaggtgtttgtaatagtctctaaagatcttttgtatttctgtgggatgagctgtaatgtcatctttgtcatttctgattgcacttatttggatcttcacccttttacaaatttcttaatctacctagaagtttatcaatctttgtttattctttcagaaaatcaactctcagtttcattgttcttttgtatagattgtatgtctcaatttccttatgttcttctcagattttagttatttctattcttctgctagctttactgttggtttgttcttatttttccagttcctctaggtgcaatgttagattgtaaatttgggatatttctagcttcttgatgaagacgtttagcactagaaactttcctcttaacactgctttagccgcatcccaaagattttggtaagttgtatctcttattttcactaatttcaaagattttttaaatttctgtcttaatttcatttttcacccaagagttattcaggaaaaagttgtttgattttcatgtttatgtgtagttttaagagatcttcttggtattgatttctatttttattgcattgcaatctaagagtgtgctcggtatgattttgatttttttaaatttattgagactcgctttgcaaccaagcatgtggttgatcttagaatatgtacctgtgtggatgagaagaatgtctattctgtggttgttaggtggagcattctatagatgtctactaggtccaattggtttagtgtcacgtttaaatccagaatttctttatcagttttctgccttgatgatctgtctagtggtgtcagtaaggtgttaaaataccccactattagggtgtagctgtctacaccttgatcttttcatagatcaagaagaacttgttttatgaatttgggtgctccaatgatgagtgcttatatatatttaagatagctaagtattcttgtttaattgaaccttttatcattatgtaatgcccttctttatctttcctgaatgtttttggtttaaactctgttttatctgatataagaatagtgactcctgctcttttctgttctccatttgtgtggtacattttttcccatccctttactttgagcatgtgagtgtagttacacgtgagcttggtctcttgaagacatcagaaaattgggtcttgagtttttatctagcttgtcactctgtgtctattaagtggggcacttagaccattttacatactgaattagtattgatatgtgggattttaatcctgtcattgggttgataattggttgttttataaacttgattgtgtaattcctttatattgtctgtgagctatgtgcttagtatgtttttgtcataacaggtattaatctctcatttccatgtttagcattcccttaaggacttctcataaggttggtctggtggtaacaaattcccttagagtttccttctgtgttaaggattttacttcttcttcacttatgaagcttagtttggtgagatatgaaattcttggttggaatttatttgctttgaggatgctgaaaataggtctccaatttcttttggcttgtaaactttctgctgaaaagtctgctgatagtgttgtgggattccagttataagtgacctgacctttctctctagttgtctataatatttttccttttgcattgaccttggtgaatctgatgactatgtgccttggggatgatcatcttgtatagtattttgctgggttctctgtgtttcttgaatttgtatgtcaatctctctaacaagattggggaaattttcatagattatgtcctcaaatatgttttccaagttgcttactctctctctttctctctcaagaatgccaataaattgtagacttgatctctttacacaatcccatatctctcagaggttttgttctttttttaacattcttttttctttatttttttctgactgagttgatttaaagaacaagtcttcaaactctgagattctctactcagtttggtctattctgctgttaatgcttctgattgtatgtggaaactcttgtagtaaatttttcaattccaggagttcagtttagttctttcttaaaatggctattttgtctttcagctcttagatcattttaccggattctttggatttcttggattgcatttcaactttttcctggatctcagtgagcttctcaccatccaggttctaaattctatacctatcacttcagtcatttcagtctggttaagaaccattgctgggggctactgtgctcatttggaggtaaggagacatcctggctttttgaattgccagagttcttatgctgattctttctcatctgagagggctagtgtttctttaagttgagtatagtcagttggcttcatttctgggtgctttcagagggccaaggctctgtacaggatctttatttgtagctgaattcttgtcttaggtttcacaggcactgtacattggcaaaatattttggcagttgtaatttggactgtgatgcagtagatggtgtttaagagtgatgaccaacagataggctcttattcagccatgcagctcttttgtatttcaccatgttctcaatagtgctctgtggtggggtaaggcagagagataactccctcaccaggttcactcctgggccttggaggagccccctccaatcactggggtcatgcccaagtttcctttgttaggtgttctgggctgtggggctccctcagatagaggtcatggctggcagacaggccacttccttcccagaccagccctgtggagagaggcaccccactttcatgctggtccatgaaccagggcatctcaaccctctcagtgttttgagagtgagaacatttcccccactcaggcaccaccaagccagtgagtcttgcctatctaagtacagaaggaccatggaggtcgcatggtcagccatcagggtctccattttttgtggggacagaatcttactatggtgctcaggctgactgtatgttgaaatgacaatattttaggtatattgggttaagtgaaaataattttatatatttatttatgatttcctttaatgtagtcactaaacattgttaaattatatatgtggttcatattgtatttctactgatagcagttgtttaaaaggatagacatgagaatgttaacaatagctattcctagtagtaaagtgtaatttttagcttttcttttttctaatttttcttgaataaatatgtgttccttgtgtaattttaaaagtaataaaggtaaaaatacacaatgaactactgctgtgaaatataccactaacagaagtactaagcagaaatgtcaagtcttagagtcctaattatttattcatttaaatacatatatattaagtgtctcatgtgcaaggcatttggacagttgctaggaaaataaacacaaaaaaagatgagctataattattttcttcaaggggttcacagtccattttggaagttaggctcatgaatagaatattagagtacaatgcggtcagtgatactatggtgatttgtattaactctcctccccttctgctttaaatgttgctgtttttctggctctaaccttagtctacttctctgcccacaacacaattgcaactaacacctatatactaatggctatggctttaactttgactttgcttcagatctctacatccaactgtcttttggtcagatggccattgggcaacctaaactgtatgcctaaaacccatcatctcttcacctcccctgctccagactcttctacctccgtaattcttgtctttgttaatgatgccaccatttaaccagttgcctcatgactctgtaaaaaggaaatttagttactttacttcacttctcaaaattcttcaggcttggcagtgcacaagcctacatatgcccttagctaccaatccaacttcatctcctggaacacttctcatcagcattgacactctagaaataccaaactaccaaactcaggaaacatcacaagttatcacctctcttcctttcattgttgcgtgtgtccttccctctgcttgaagtgtccaacctcatcaccacctcttcttcatggttcctagacattcctctctgttacctcccttgatcttccaggcaaattaggctctcttctctctggctccccttgaactttgtacatacctccaacatagtgattttcccattatattataataccagctttctgtatgatactctattccctaaggacagagattgtatctcattaaccttggtatcctcagcgtcacacggaatgtgacagacagaaaactttcaagtttactgaatatttcctatctttctttaccttttccactctattgtggtcactcttaccctagaataatgtagatgttccttgaataccaaccaggcttcacttctgggtctttgttcttgaatggccttaccccagatggttccctctgataaaccaattagtcactgctcagaagtcacctcatcagagaggtttttccttcaatcctgtataatatagtgcctggcaagaaaaggatgccctctctcaccactcctattcaacatagtattggaagttctcaatcaggcaagagaaagaataaagggtattcaaacaggaaaagagtaagtcaaattgtctctgtttgcagatgacatgattgtatatttagaaaaccccatcgtctcagcccaaaatctccttaagctgataagcaacttcagcaaagactcaggatagaaaatcaatgtgcaaaaatcacaagaattcctatacaccaattatagacaaacagagagccaaatcatgagtgaactcccattcacaattgctacaaagagaataaaatacctaggaatacaacttacaagggatgtgaaggacctcttcaaggagaactacaaaccactgctcaaagaaataagagaggacacaaacaaatggaaaaacattccatgctcatggataggaagaatcaatatcataaaaatgaccatactgcccaaagtaatttatagattcaatgctattcccatcaagctaccattgactttcttcacagaattagaaaaaactactttaaatttcatatagaaccaaaacagagcccatatagccaagacaatcctaagcaaaaaaaaaaaaaaaaaaaaagaaacaaagctggaggcatcacactacctgacttcaaactacactacaagcccacagttaccaaaacagcatggtactggtacaaaaacagatatagagaccaatggaacagaacggaggcctcagaaataacaccacacatctgcaaacatctttgacaaacctgacaagaacaagcaatggggaaaggattccctatttaataaatggtgttgggaaaactggctagccatatgtagaaagctgaaactggaccccttccttacaacttatacaaaaattaactcaagatggattaaagacttaaatgtaagacctaaaaccataaaaccctagaagaaaacctaggcaataccattcaggacataggcatgggcaaagacttcatgactaaaacaccaaaagcaagggcaacagaagccaaaattgacaaatgggatctaactaagctaaagagcttctgcacagcaaaagaaactatcatcagagtgaacaggcaacctacagaatgggagaaagtttttgcaatctatccatctgacaaagggctaatatccagaatctacaaagaacttaaacaaatttacaagaaaaaaacaaccccatcaaaaagtggacgaaggatataaacagacacttttcaaaataagacatctatgcagccaacaaacatgaaaaaaagctcatcatcactggtcattagagaaatgcaaatcagccagagtgagataccatctcccacaagttagaatggtgatcattaaaaagtcaggaaacaacagatgctggagaggatgtggagaaacaggaatgcttttacactgttggtaggagtgtaaattagttcaaccattgtggaagacagtgtggcaactcctcaaggatctagaactagaagtaccatttgacccagcaatcccattactgggtatacacccaaaggattataaatcattctactataaagacacatgaacacatatgtgtattgtggcactattcacaatagcaaagatttggaaccaacccaaatgtccatccatgatagactggataaagaaaatttgcacatatacacgatggaatactgcgcagctataaaaaaggatgagctcatgtcctttgcagggacatgaatgaagctggaaaccatcattctcagcaaattatcacaagaacagaaaaccaaatactacatgttctcactcataagtgggagttgaacaaggagaacacatggacacagggagcggaacatcacacaccggggcctgtctgggggtcagtggactaggggagggatggcattaggagaaatacctaatgtaggtgacgggttgatgggtgcagcaaacaatcatggcacgtgtatacctatgtaacaaaactgcacgttctgcacacgtaccccagaacttaaagtatatatatatatatatatatatatatatatatatatatatatatatatatatatatatagtgtgtgtgtgtgtgtgtgtgtgtgtgtatttaaaaaaagatactttcctaattaaagatagtttcctaccttgaaaaatctctaatgccagctactaaagtaacaatttctcacttatccacaggggttatttctggccagtgagatgatgaatgactgttttatgttaatttttaattttatagtattctcatgggattaaaataattccgctaacctcaaaaaaaaaaaatcaggaaacaacagatgctggagagaatgtggagaaacaggaacagttttacactgttggtgggagtgtaaattagttcaaccattgtggaagacggtgtggcaattcttcaaggatctagaaccagaaataccatttgacccagtaatcccattattgggtagatatccaaaggattataaatcattgtactataaagacacatgcacgcgtaagtttattacagcactattcacaatagcaaagacttggaaccaactcaaatgcccatcagtgatagactggataaagataatgtgccatatatacatcatggaatactatgcagccataaaaaggaatgagttaatgtcctttgcagggacatggatgaagctggaaaccatcattctcagcaaactaacacaagaacagaaaaccaaacaccacatgttctcactcataagtgagagttgaacaatgagaatatattggcacacggagggaatatcacacaccagggcctgtcggggggttgggggctggggagggatagcattaggagaaatacctaatgtagacaaggggttgatgggtgcagcaaaccaccgtggcacacctatacctatgtaacaaacctgcatgttctgcacatgtatccaataacaaagtataatataaaaataaattaaaatgtatattttatatatattgaaattatttatatattttgaaatatattatatatatttatatataaatatatattatatatatttatatataaatatatattatatatatttatatataaaatatatattttatatattccaccagaatataagcatcaactgggatctaattaaactaaaaacttctgcacagccaaagaaataatcagcagagtaaacagacaacccacagagtgggagaaaatatttacaaactatgcatctgacaaaggactaacatccaaaatctacagggaactcaaacaaatcagcaagaaaaaacaaataattccaaccaaaagtgggttaaggacatgaatagacaattctcaaaagaagatatacaaatggccaacaaacatatgaaaaaaaatgctcaatataactaattatcagggaaatgcaaatcaaaaccataatgtgataccaccttactcctcctacaatatggctataatttttttaaaaatccaaaaatcaaagatgttggcatggatgtggtgaaagagaacaattttacactgttggtgggaatggaaacctatggaaaacagtgtggagattcctcaaagaactaaaagtagatctaccatttgatccagcaagcctgctcctcagtatctacccagaggaaaacaggtcattatacaaaaaatacacttgtgcatgcatgtttatagcagcacaattcacaactgcaaaaatatgggaccagcctaaatgcccatcaaccaacgagtggataaagaaaatgtatacacacatataccatggaatactactcagccataaaaaagaatgaaataatggcattcacagcaacctggatgaagctggagaccatcattctaagtgaattaactcaggaatggaaaaccaaatattgtatattctcacctataaaagtgggatttaagctatgaggatacaaaggcataaaaatgatataatggactctggagactcaggggagaacgggtgcaccaaaatctcagaaatcaccctaaagaatggacccatgtaacaaaaacctcttgttccccaaaaaattattgaactaaaataaaataaaagtcattttttataaaagaatctaagtatcaaaaagcccaggactttgtctgaattattcaacaaatgaataaagatctgatacatgtataaataagtaaatgatgttatttatcacctaaatatgacactgtctctctgactttaattttcctttcatctgcttatttttcttcccaagccatgaatatgggacaaaaaaaagggattaagacacaaacaccaagaattggcaagtataatgaggctgaacttgaaaaataacaatagttcaggtaaccatatattaaatttgtctcaagaatttattttattttctcattcatttattcaacaaatatttacatcacgcctattatgagttctttttgaaaatgcaataactgtctcttacatttgtaccattgtttatagtttacaaggtcctttctgatacttattttaacgtatcctcataaacaattctttgaggtaagcaggtcttatgaggaatgagtcttatgaggaatgagttaccagattaaggatcattgggttgtaaaaatcttgagctagaaagcattccatcgttttattgttgatacaactatatacagaagcccattatcaatctatttatttcaccacagagagctataatacacccattgaccatcagtaccagtatattaattttcacttctgggatttccagcctactcttagcttcaatgttagtgtgaatatttcatggtagaatgcacaaactttgaggaaggtgcaatgctttccctgtttcttccacttatgttcaggttctgcacatactgtatgttctccataaatatttattggtgaagagaacagttattaatgtaagaatctctctattcagaaaatatccaaggaaactgtgatagctgctggtttccaaagatggtcttccaatgaactatgtctctcagtattcggaattttgcataattccttccccttgatctggactggctctgtgacttggttataaccaacagaacatggtggtgggttaagcaatactcatttcatagggggcatttctggtcacatgatacttaatggtccatggtcaaatactaggatccagcaaagagccaagagctgtttctcaaaaaaaaaaaaaaaaaaaaagaaaaagaaaaagaaaaaaaaagaaaaaagaaaaaaaaagttatctgcagagtatggcatggctttgctcccagattctaaaagtctgttctggaatttacctaagaggcctgccaaaagctcagtaggcactttaagcaccactgaatcagatgtgtcatatgaccaaagtggcagggaagcttgccaccctctcacaagggcttgtctttcgccaggccttattcaaaactggaagcctttcagattactcattcagcaaataggtttagactataacaacacacccaaataagatatgttgcctccaaaatccaatgaggcacaccagaaattgggactctttctttatggtaggagagaccagatgtagcattgaacttcaccttgaaagagatatctcaactttccccagaccatgaaaccccaagaaagttcctgaaggagcaaacttctaaatttttctgggatttatttcacaacctcttgcctctatgggtcttaccaaggtgtctaaagtagttgcgatttcctggtccaccagtgtagaggatccatgtggtgtgttgtgaaatgaagaggcaatcaatttcctgtggaatagaataggccagggttggagagttgatataaccctgaggtgaaacaaggagggtaccttgtttcacccttccagatgaaagaaaaatgcttctgatagtctctactaacatgtatatagaggaaaaaatgacttcccatatcagtattcatatattagatgtacatatattgatttactatagcaatgaaaccacatctggaacagcagctgtgattgtactcaccacctgattaagtttacaataatcctttgtcattcttcaagatccatctgtcttctgcacaggccagatagttgagttgaatggaggtgtggtgaaaatcaccagccctgcatcttttaaatcttttatagaggcactaatctctacaagtctctacagaatgcagtgctgctgtggatttactagtttggaatacaaaggcagttctaatgccttctacttgtcctcactcctcagatcagataatcaatgtagttattctgcctttcctgagtgtgcctccttcagttaagcattctagaacttgggaaataaccatggggtaagttcagagctaactggatgcaatatgagatggacctgagccaaaataccattaatcattcagcttcaataaacccctactctggtaaataggcaatagtagcatattgtgtctccaaggactggtatcatttcagagccaatgtccagaaatcccccaaaggtctggttatttacccttcccaaatgcactatgaccttggcaaatggctttaggtcttttcagggaaggaaagaaagagaaattacagtctaaacttttggaatgtaaatataaattagaaaaaatcctgcagtccttttggcaggcagggtacctcatcattttgttcctgccctgatatgggttgccaggagttgagtctagctataggcatacaaacagtgaaagatgttgggggtgagtcttgaggggtctcagcaattttccacagagtaagtccttacagccttttcaatcaagggaggactaaactcctcagagggaaaggctgcttctgctgggaaaggagacagggctttcaaggttctcagcttccaaagaatctgcctacatgttgccatctcaattttcaggggaggaaagaaggagaaattacagtctaaacttttggaatgtaaatataaattagaaaaatcctgcagcccttttggcaggcatggtacctcatcattttgttcctgccctgatacagcctgccagctctgtcccaatcaaagccctaattttaactgtaagaccttcaattgaattgatgttctaatctagctagctgcaggatcagtctttgggcttggttttttgaaatatcagatcttgcagctatgagagataagagtttctttcagagtagtcacaaagacttttcagtcccttgcctgcatcttgaactgaacattcaacactctgagtttatttctttttctccatattctctgtgacactttgaagcaacccacaaactccagtcctcatactccttacttccactacattggtctatggcagcatctacctggtaatctaacaccttgccttctataagcacttgatatcaaggactactgtgtcccatttaccattggcagtatagtcactaatgcttcatcgaatcagagaatcaacaccaaattcccatccttaaaattctatctctggattcacttccaacaccaatagttgtatcagttaagagtcagtcagggaagcagaaccactgtgaatgatacagaatataggaatagtggattcgttgtggaatcagaccttacaaatgtgagagaagctagagaaggaaaggtctggaagaaggagtcagaagatcagaaaaagggtcattaacctgtctatcttatgcagtagcacagatggaccagacaggctggggcttgggggaaatctaggaagctaaacactttcaaccaccaaagtgggactgtgaaggggagctcatgaagaactgtatggagagtggttacctgtctgtagcaaccacttctgtgggtccacagccaagtagttggtgatgggtctcgagtcactgttgttcagcagagccaagagtcagaaagattcgctggatgcagagtgaaggaaagcaaggactatatgggacctaccaagcatctctccctctgtccatcactgtatgtgaccacagtgacttcctaagagtaatagttaccacttctgtgttctaactcttttcccatttcatctcttagccaatgctaatacagagcgatacatgaaaggggattctgagaaatgcagttgtctgcttaagcaagttgaccagcataatccagcacaacttctaaatctcagaagatagcaaatgtgggcagaaagaaaagtacagatgctccacgggttcactggtgatctttatggctgcaactgacctaggatttgggagatgcttggagagggacagaggggcacacaggaactttcctctcaaatatgaggatatcaatctagatctacgaggagtccttttggagataaaaagaaatttataggagatgatgaacaaaaggcccaatttctatattagactgtctccctgaatgagggtgaataccaagaggagactgagccaaggcctcagccctctgaattctaaaatgtagagaatttcattctgatctattttatacaaatggtgctggtctctcagacagtaccttttccgatgaaagaaagagagaaacgaagtagaagattcgtaacccagctcagtaaagaggcttacctttgctctttgctcaccatcattcccccgctcaaagtctcagctacctgcctctgtgcaatagctacacagtgctcctcaagtatctgcctcctgaacacagaattataactaacaagtatttaaaatttatgtatttggtgcacatctttcagtatgagctttttggcaccaactcttactgaatgccaatataaaagtaaacaatttgaaattattttaagtgattatcaaaaataacagcataaattctatgatgtggacttcagccacagtcccttccagggactcttccaggcagaccaaaagagaaaagctgtctgcaaaagaaactcaaagttcccaggaccaatagcatacttgagtcagatacagctccttaaaagacaagtaattttcagaggccctagggtaaactaaattagttttaacataatactatttaaacatgtagaaacataatatgatttataaactctatatgcttattgctcttatgccaacaatttaaaaatataaattaaacattcacaaagcttcaaaaccactacaacttcaataaataattttaatttaatgtaatgataatacttggctaaaactaaatcaccaggtttttttctttccaccttttatattaggtttaggtggtacaggtgcaggtttgtggaatgggtaaatatatgtcatgggggtttgacaagatacagattatttcgtcacccaagtaataagcatagtacccaataggtaatttttcaatcttcactctcctcctaccttccaccctcaactgggccctggtgtctattgttcccttctttgtgtccatgtgtactcaatgtttaactcccacttataagtaagaacatgcagcctttggttttctgttcctgcattaattcacttaggataagaacttccagctccatccatgttgctgcaaaggatgtgacttttttcttttttatggctgagtagtatttcatggtgtatatgtaccacatttcctttatccagttcatcatttaagtcaccagttttgagtttaatagatgaaagatatatacgtggtgctgggttttgcttattaacttgattcttctcattttgtacataattttcatgcttgttttcctttgtttgaaacaaattcatattgaattgttaattaattcacttgatgggccaatcaatttactgtgcaccaatagtacaatactgaaagaaatatttttaacttttaatgaagcattctttactattgctaatcaactgtagtacagtgatttatacaaaagatgagctctacacagtacagccatgtgaatggggaatttagcaccaatcattcattgagttccccatgcttacagcatctaacttgttatgattctattttccaatgactgttttatattcaaattacttgacattattaggccttcacttagtattaaagtaactattagtattagcaaagcagggcatcaaaatattgtgacagtgtttgcttatagttgttcagccccaacgtgagttagttgtgttttatgaggggtatgtactccttataattttgcataatttaaggcttatgtttccgtggggaactggttcacagagcccaaatacctacaactttgtagcacatttctgttttaatgccgctctttattttcttagcattatctaccatatttagcaactgctcttttctaaattagtggtaaaacacatcaagggagttgtttggctttttctgtgggagtgaattatagctaacatctgtgaaaagttatgtatctgaatgcacattttccagcatgagctttagtaccaactcctaatgaatgctactataaaaagaagtaaaacaatttgaaattatttaagtgattattaaacataatagcataaaataaccaagatctcttatagaaattctcataaagcaacaggtggaacataccatactaacaatggctggttctttccattaaagctgaagtagctccaccatgtggcaggagtaaaaacaatctacgattcctttagcttgttcaccaactgaaattacacaaatctcatttaagtttgatgagaaccacaaaattacccattcttctcagaatatatgggctattaatttttatatcacattacttaaatttcacataatttatgctgcccaactacatgttttagactaccattccattgaaaacacatttttaactccataaaattatgaagacccatgaaaattctagagatgcatatattccaagtataataaatatcacaaataacttttaaattcaatttttaaataattcttgttactattataatttccatacaggtctcagaagcatcttaaaagtaatgataactttttgtctctgtaaaaagaatactattcaaaaaaggacaaaaagttcataaatgtggaatactaactttgtaactaatatataaaatacatgagttttttgattcctaaattcttccaacagaaattcaaataatgtaaaatattggtatctttaagccgtaacttattaccttgttaatttcaaaacagcatactagtaacctgatctttaacattagttgttaccaaattatagtttttaaaaaatttcctaggaaagtacgccattttttgggtatcgaacatctcacctcataggaatacggggattgttttccttccactcttttgtattttccaaattttcaatgtaataagcacatattaattttatgatgaaatgaaatttgtaaaagaataaatgttaacattagaagataattaacaagttatctatctcgagtcaatatacaatacaaggaaattaatataccactttacctggtggcaaggaaaataggtgagatatctttcccatcacaacataaaaatatatgttagtaaatattcatattggaaggaatgtattctatgacctagcaattacctgcgtcccagtcttggcattactcttattgtaaaagaaagcatgaacaagcagcaattttggggccataacaagttggaaataacataatcatatagtaaaaagtgatatcacaggttataataagtctatgttccatatattaaaaataatgacacgaatctacatataatgaaaagagaagattgccaaaatgcattattgattgagaatgcaagttgcagaataatatatacagtattatgctatttatgttgataaaaatattgtacagtataaaccctaaatattgcacagcaaaaggactgtaagtacattgatgaattccctgttattagtacctgtggaagagggaattatattgtgggatgggagaacagtcagtggagagtttggttttaattgcaatgcttttatttttataataaggatgtattagcatattacttgcataattaaactttgttttttaggttttcttcttcaccatcgtatatttgcatgcatatacctatgcaaataacaaagtccacctttattggggatttgtgactggcatttttctaagcactttgtcatgtgtcatatattgtatcatgtaaacttattattaaccttatgatgctaataatatttttcccatttcacagatgacgaaaccaagcctcagaggaactgagtacattgcccaaattcaccaagcccgtaagggttacaatcaaactttgaatccagatatctgtctcagagtccacaatcttaaccaaaattttttttacaaattcccatgtagaagtgtgtacatccacatacagacgtgcacacacacacatccctgctgtccagccttttctccccctgacacttgagtgcacaggtcattggcatcttctctccataactttccaccattgacagaaatgtgtttgctcaagggatgaattgaggtgaaaaccttacaacattagctcttttgtaaaaaatctgagcagattttttattttgtattttgttttcctggttacgcctctccttttaaagttttgaaaggtggcattaatatctatttctttcctgactgctccatttattagtttcattaggattagtgaattctacttggtctttccccaatccattaatattttttcccttcacttaaaaacaaacaaacaaaaaaaaaaaacacttgttttccaaatggctttggggtggtagtaggatttcctgatggctagaggaaactcctcatggcagtatcttggttgagtaattggtcctcgtctgtatgttcaagaaggtgaatgttcttagtaaacccagaggggatcagcccatcagaggtaagcttctgctatgtaaattgagacgagattcaggcttaacctcaaataccaatgcatttgctcttctggtctctcccttctcctccttattatcatgatactttaaaagccaaattactgataagaaatttgcttgctgagaacatagaaaggtaaacggctcgagagagggggttgtacatttttctttaaatctaaaaaaccactatgaagaatcccaacctcccaacaaaaattgcctctctgttaactggattttacctgcatccagttttaacacctctctcctctggacagtgctgacactgtcctcctgggaattatgacttccttagacacataatgctagagtcaagttggaacttagattctttttcttgcggaagtgggaggcattgtgtcttctcccttcatgcattaatttaattagaaaaacattcactgtctctcactatcagcctacagattctctatcttctcagcccggtaagagccttatcacactgagataaatggttctctttgttgtaccaaggtggttcctgaagcatggtaatggggaggagacacctagagatcaaagcaactaatacaatcaactccaatccagccccaaaccaagtctttccaccagctattcctttcatatctaaatgttgtcctcttcctctgcagcaggatagaaaatcaatttctaagtgtaaaggcagtaaacaaaatttcagagatatatagtatatgtaagtttgagtgcataaagttaaaagattcccaaatatctaaaaatgtttgaattaaaaaatcagtatcaaattagtaaaaaaaaaaaaaattaaaaaggtacgtgagctgtataacagtcaaatgttaatatgcttaatatattaaaagtgtatataaaaggataaggacaacactagcctgatggatatataggcaaaattcggatacaaaaattgtgtataaattactaatgaatatttgaaaaaaaacactgaaaattttaaaatgcaatgaagacagctataattcatatcaagttaacaactatttttaaacaatcacaatctaatgctgatgaaattcggcatattaagagcaattacatttttactgctatgattgcaaattgatacagtataacagtagattatttggcattaggtatcaacagcttttaaaatagtcatcctcttgacccaaatattggaaatctatcattaaaagggtcttctgagcagattttatataaggaaaatgttcattaaatatttttcatactttcacgtaatttgaaataacataactatccaacactagagaaacagttaagcaaattgagcaacatctacccagtagaatactatgccaccattaaaaattagattttcaagagttttaaattacatgggggaaaataaagttaacagaaaattgaatgtacaaaacggcctcaacaatgtcagaaaatatacttaagaccaaagactaaaaggaaatatgccaaaatgatgtagttattgtctctgggtagtgagataatagattatttccttcttcctcttctttttataattgtatgtaaaccacaatttcttcttcaatgaaaacatatttttataatgagaaaaaatgatctaataacagtatcttttaaatacaaggttatgtgccctgaaaacattcctagtttcccttaaagtcatttgtctaacataagtgaatttgtctgaatctctctagaatacacattcatatgctctaccccaggagcaaggagttcctaaaatctactccctactatgtaaaataaaactgcctttaattttttcctgaatttgtttcagacttcaagtagagttctttattatttctgttcaacagcacaaactacaaacataatctgtttggcaaaccatttttattcaaaagtataataatgccttgtttttcatccttccagaggacctagtggaagaaaatgcctaacatcagggaacagtaggagcagcctaaattgaccacagaattgtatttggccactgtcctcaaaaaattcaagtggattcagtaatcctgaatacttatgtacaacaagcattcctactataatagatcatgaggattaaaatgaggtgagttcattggtgagcatgacatgtagccatagcaattaatcttaggttccttctcccttaaaaatggctaataaaacagaagaaatgctgtatgaataatttcagaataacatggaataattgtagatatttctataagatttgtaccagatccactagaacaaatctaccagtagctaaacactgtagagtctctaaaaatggacaaggaggagatgtgacaaagatactctttaggggaataaagtcatcctaaaaactgaagatattttctgctctgccaatcaaggaatcactgttctttccccagcaagaaggagagtgaaaagaggaccaaattggaggccccaaatttgcattttaatcataacctttcatagctaattatgagatttgagcattctctggatctcagtttgccacccataaaatgatgggtggactgaaagatttctaagttttccagttctgacattgcatgggtctataaggagctccatcttggttggcccctgaaggcacctggagactttggttttagggaaccaaggagtctcagtgctgaatgaggatatagttccccggtgtagaattttagaaactatgcaagcacttggatctttaaaaaaaaaatagttggtccctgggctgtctcttacaactttaatatttacactatgacaaagtgaaagtgctcattcgtgttcgagccaaagtaataccattctctttattcattccaatgagctaattttacatgagcaagaaagcactggagaggtacagacccatgggatatttgcctagcctaagtgagtctcagatggaaataaatatgaaaagcgttagcatgggacctgtgagaaattgattcttacatctggcctccaaagggtcaagccacaaataagtgacctttgacatgccccttctctagttcagcctggagctgcccacatttcccagtggtgcccagtcaactcattctcctgatgcaggatcatcagagagaatctggagtaatggcagctgcgggtaaggggctgccaaataatagtggaacaaagatctcttccaagtttctatttcctccgaatagctcaaatacttcaacagtccaggtccccctaaagactgcattttcttagctgcattctctctagttgtgatgagtgtctcaaaaaggaacacctctcctcctgagtttatgatagtttatgacctgccacttcatttccagcagtgtgtcccagttcctcttgcaatccacaaaggacactttttctttcagtagcctggtgtgagctcttgcctctcaggattagctgtgatcttactgctggggtgggagcacacttagccacagggcccaaaagaaatactgtcactgaaaagagcactttcctgtatttgagggctcttcctctcttctggtacacccggggaaaaacctggcagagtccacccacagtctttgaggattaattctgtaagaacttcttacactgaagggaatcctcctccaggggatgattctgctctgtgcttctgagctctgatggcaatcacatcaacatcgctggggactgtggcagaagaggaacatcacccactggaaaccggggcaagttgctcctctgtagttccaggaaatggccagaggcacagctctgctgttccaatttgcagttttctctaacatcaaaaataaaatgtgatttgcatttgaaattttacagaattcctcattttaggtcaagactggccttacccataggttagtgacttatgtggtaggatttaacacacacacacacatacacacacaaatattatccataaaaagaattatattcccaccaacctgctgtggcattcatcagtgaccctttgaagttcagccattgaaggggcaggttaaaatgcaaatttgtttcttggagaggtagcacatagagctattatcaactgttaatgctccggtattgctggaatgtcagactaagaagtttgggttaaaaattaacatatcagtaagtgaagactggctttatatattacatatttaatttataaaaatggtgacattaaaaggtggcaccaaaatgtaaatagaatcaagatcactttggataaattaacgcatgacacaagcctttgacatgttattaatggaaatgagtttgggggatctaatttagcctttgagattagtgtcaacaaagaaaggtatctcctctggtgcccatggcagaagcagaacattagtacaattcaccatagatcagtttcactttgtaattcagtgtaagtggtttatatgatagagagggcaggaagatctggttttgactctgtctctactacttacaagatgcatgaagctgctcaagtcacttaagcaaggtgagcctcaggttcttcatctacaaaagtgggatgtagaaaagaagagtaaatgtaaaattcctgttcagtagttgtctattaaagaatctctccttccttcctctattcacatccatcagggagaggagtaggctgatggtgccagctaaggacctcggcactcctagacctattcctgaaccattaatggctctgaatttgggacaggaatgttactctcatggttaattccttgctcacttgtctgctggtgcttgttcacaatgtcaaagatatggcaacttcatgggaaggcaggtttaactttttggtgtttttgcactagcctgtatatctgtctacctttcatttgagaaccaccttgctgattcagactggaagcttcaagagagaagtttctttccatttaatgcactggggatggtgctcaacagagaaccacactcaaatcggggctaaataatatggcaatatcatggttgcaaaagaaacacctccctttctcaccaaatcactgaatcccttattctataaaaatgaaattgaactgcaaacatcaccaccatgacaagaggatttaggcacactgatcaactgattaaattctatttgtcatccagagtgatcctggaggccttcagagcctggaggaaacctctctgtgactctactcacatctttacacacggaaaatccaattaggctgagtatctacagcagcttccagaagtaaactgattgcagaagggcagcctgctgcctgaggactgcaggggacgaggaaggggtgggccacctggaagggacctctgccttctcagcacctagagttggtttccagatgatcacatagtttaacccttttcttttatagacaaggaaattgaggcccagaaaggttaacagtcttgcccaagacctaagattagaaggcagagtcggggttgagaattgcttatgtgagactcagacccaaagcagacgaccatattttcaaattcagtgaaaactggaaaactcgtatgggcctacccagcccggaaaatccccatgtattaccaatacatagtaaacgaatcaaagattgaaaagtttacttgaaaaccaatcagaagtcctctcccacatgcaaaaatcccaccctaatagaacactcatcacccgtcagactgtcttaacacttcttcctttttctttctttgcaaacccctttgagcctgtgccagaagtgacggtgcctgccaccctctctgcagtcagtcctgaccagttctctggggtttacacctgtcctctggccactcgtcagctgcacttcctgcatctgcttgtttcaccttggccccagctttacctgaggggtgcttggcctgtgccttgagttccagggcctatgtttacttcaaaaatattaatgtcaattccttcaacttgttccaaagacaacagagcctctcacaagcaggcaagccctgccacttgttacgtagttgaggctgaggagcctgcaggtcccagccaactttatcacctccctcttctgaggggtggaagtccccaacatctcagggtcccctgagagtatggggattcccacatcggcaagtacctgcttcagagaagcccatgagaaactggcccagagcaagcgggtccaccctcccattgtgggaaagtgaagggcagaaggagtctggctggaggtcactcctgccactgatcttcctcactcgggtccagcctgtcagaggataaagcacagtggtgggtgggggtatctggctctcccccaccctccttctcaggggttcagtagtccctgggaacaagattcagctcaggaatttctgggatgctggtcagttctggccctaaggacactgggagtgacagcgggctgctaaggatgtgacagtgactgggctgttcccttcacatgactaccagggcaagccctggccaaatcccagcacctgctgaaagttgaagctgaccactggagtgattagattcatgacatgtggtggaggcctggggagtggagctactgggaaaggacacagctaaggaatctcctccctcccagcattgcttgaccctttcacaaagacagtggtaggtagaggaagaaggagaattggcctactccttccttttcgctgtatatggtcatagaaattgtcagaactttatatctagattcaagttctatctctagcacaattagctctaaaactttgcgaacgttacttaacctcctaggtcctctttgttcataaaacgagaacgtaatacataccttggttggctgtgaaagttatatgagtcagtgttgtggggaagttgaaggcatgcagtagatgcacaaggaaaattaaattccgttccccagttcctggcttgcaagttgggggttaaactcagttaagctcagagaagacatgacatgacgggggatcaagggagatgtgggaagctcacgggctgtggttcccactgatccacattagactccaaatgacaacaccctcacaatcccatgaaattgagcagaatttctcttctttcttgtgatgtttccagaaatgaagagagagggaaggaagacacagactctgatctttggcttcactttggttccaagacctggagctgatagtgtatggagggttgcctgtttgtccaggcactatgaataagaccaaggtaatccagcccaactctacgacacagctaagccaacaagcagctggatcttgtgtctcagcactcacagaaatgtataaatcatctgataccaactgctccccggaagcctctgtctccagaatataaatgtccaactacaggactggcaaagaaaccaagccctgggcaatgcctactatggacccttatttcttgtggtttgctaagaaaaaagtaggcccaagggagaggagggggaaaaccaggagggtctaaagttcttctgactgaaagaaaagaccacatcagagagaaagaaaggaatcagttaagtaataaaaggttgtgagttgatttatcattcaactaaacaaattatcttcctacacaaacattctgaggattaagtgaacaatataatacttttctgagctctttttgatcaaatgctttgctgttaaaggttatattcctagggagttgatactgaagcttcttgttccttgtcagtaaacacaaggagaggccaaccctctgtaaatttaaattacataaaacctttccccaaactgtctggtctcctaacagccccttttcactgaactctgtggttatggaatgtaagtatctttatcacagcagcacagacttttgaaaatttgacataatagaatttcttcctcacaaggcatatcaaacaccattgcaaactagtgggatttttaatcaagactaaagcagaggtcttttatttgtttgtttgtgcttagattatttccacatgaccaataaaatgttctctctgaccatcatccctgctgactagaagtaccaggaaccttgtctcaccctcacctccagaggtaagggtatgaacggactgtgaaaaaacacagcagaacactggggtcagcagagagaaagcgaaagaaccccatgggcagataatctaaaagcagcagagaatcaacgggaaactaacacaagtgcctgaagatggagacagcaatttttagtgattttggcttgtctctgttctatgaagctccaactcagtggcaacctagtgtgaaaatttatgaaatacttttggatttatctctgtaattccaggtctggcacaatataggtttcttgaatgaataaatggatgaacatgtcaatcaatgaatgaacagtaatattaaggaggggaagaaaaccattacaggtcaatgaatgggttcctagaagattcccctgtctcccattgtcttccgactcagggagacaacagctggagcagagtgcctagacttcgggggcttaggaggccacacatcttagagagcatttcaccatcaactgcaattcctttggcagtttgaattataatatttacttccatgatacagtcttcagctgttgtaactgctagtgacccttctctgaatccctacttcgtatgttagacattttttatatggagaattaatacagccttgactgctatgcttcttttttacttccatctctaataataagatcctcaagggtcgagactgtcatactcttgttttttgtgtttacttcactgcatatcctagagctgagtacatatggaagaatgaatcaattgatgaaatttatgaacacatgctgaggtttaaagagaatatcaactgcttggtttgatgacaaaaagcaacatcactctgtgtctagcacgtagcccagaggtgcgggccccatcctctcgtgtgaggagcccacggtgatgcataggcacctgcaccccgtgcctaaaccctgcagctggcacgggccctgtctgctcttcattcaccgttctcacgagttgcaataagttcagccctccatgtcacactgtgttttccatcctggggagtgtttcacagctatcccaagccccacgctgacgaatcacggccgaaaacacactctgatgccagcacagaccacggagcaaatgtcagacaagatcagcctcggaaaagtgagtcctgaattgcgatggaagtgggcttcctctcacaaggactttgtgtggagatgcgcaggtgggctgttggaaaagacccatggaattcccttcctctgggtgccttttctgtcccaacctctggggattcctcaagaatcggggggatttcagcacggagtgtgggactctgtctgccccaagatcagaggattcaccttggcttttggaaagaactgcccagtgtatcaggtttttatgagtcagttttagagttgggaatgcggacagatttgtaagaaagtccacagagcatatctctccacagcggagaaggctctcgagccccagaaggcaatatcacggtggcctaggtggatgtcacggggtgagaatcaaccctcagttgccacgaggaatctgaggagatccaggattacggtttttatgtaactgtcttacctctgtttcacaagggccaaaacttcagccccgttataaaatcaacagatgcagaaaagagacaagtggccactagatggcagcagatggtaagaaacgtgagttgcaggcgggctgggcaagagttaggctggaagcccctccattttgctttacatctttaatgagatatgtgaagaaaattagtcccttacatgccagacgcagatgccacagcatatggagagatgccgcacagcaatatttctctggttattaaacaggaggcacctaaccagtcattcactgcatcatcatgcagagttatcctttaggtctccggatactgttgttgacaaggtaataacagaagaaagcagttgagaagactgatgtcgggacgtgggcctctgggctcgtgggacttcaccatgccaggggatggggcacattgccagaaaatgaggagcagcccactggggccacttttccgtggccagggggacactgtggcttctgctgccaggcttagtcccagcaggcgtctgctgctctctggtccccctggcagccctcgggggctcatttattcagaagccccattaccgcgagacaattctgcggtctgacctttcaccacaaatcccaaatgggaaagggagctctgggaattttaaagagcaaaccacacttgcttctccagcaaaattgaaaagatacagcataactagagtgcattcaggtgcacatagatagggaaacacggtttccatgctgccccaaacaaaaggagggagtccagtcctgccgactgcaggaaacagcctcactcggaagacacactttttcttgggagagtgttcccaggtccagagcaggcagggattgcgcccacttccccacttctcacacttttctccaaccccaccactcagtctgactattcctttatttaattcttccacactcccaaacccaggggcttcataaggccttcagggtagctgaggaacagagaacagattattcagtccaggcaactagtccctgtctcaggcccaacaagaaactgttatcttattaacctgaaagcccagaactctcaggacttctcagagtcactcatgaagccccttaacagtcctgaaatgaagataaataatacagccatttttcgtacagagaaactgaggtataaaactgagatcagctgcagctctcctggtccccattgctttcccacagattcaaccctctgaagcatcctccagtgaaaatgtagtagcaagattcaccctaccaggatttctctccccctcttagaaaattacttcctgcgctagaaatcctcacttgtctgtgtgactttagacaactcgcttaacctctctgtgcctcacttatcatctgtaatttgagggactagaaccagatgatgactaaggcccattccagctcacagtcttgtggctaatttcccagtcctctgccagccctcaaagagagtcgtatgggacactttttccagcaacagccaaactcaacaggagcaagcagaatttccttctccaattgagaagcaatggggtggtggttggagtcttgttgatgtcctttgtccttggagtgaggcaaacagtgaggcttcagatgttattggcactaacagcagggcctggaggtggccacactcttgtggaaggaccatgcagagctgtccctgtgggcagtgtaggtgcatagccaagactgagggatgttttaataactacttctcaataagaagacctattttattctgcacaggggtgtggacccaatccaggtctcccaggaggaatctactctcacccataataggggattggttcagctcagctgcgctcacaaagggctatacagcatgcagcagtacaggcagctccccgcagctccatgtgaaaatgactcacagcagttatgaacatcaaacctcctttgatgtgttcccagacatgaagaacagccacgggaggaggagacggactctggttgctagctctgtggggtggcgcacagagggcctggacacatctggtaccatcctgaagctccaggagaaattcaggctgggtaattacctaggacttcctaggataacagagcttcctttcatctatctctctccctccctctcactgtctttctgtctccagctacaagggaattagattctccaaggaattacaacctgtttctgtaccttcacctttcccgaggagataacaattcacatccctgaataaaagttgttttattgagcacaaaatgaatgcacccccctcgctcagcatctgtgccaattgccttaaagctatagacctggcctccatcagccaagtgaaaggattttcctctgtcatggccatttccagactctcagccttttgagtagccacatggtaccttgtcctcctaataggctctcaatgatgattgaatacaaaggctctaattctctgttgcattggcagctcccaagactgggtcgatcacaatcgtccacagcagaagacagcggtgctgacggtcaaatgagcatcagggcacacagcagaaggggagggtcagccactgtcccttcatgcccatttcaacagaaagcttatttatatgcaagaggtgttccccttccagacagggttcaagagcacattggtccctggaaacttgagcaaagtcttcacggttatagaagggagtggcaaaggacatgtaggagagaatcagttccaccccatgcctgcacatttcattttctgaaatgaaaagctctcatacactcacagagatctgcacatacccacacatggaaatagcataaacagctactctttactgagcagtgaccacgtgtcaggcacaatgcctcgggcttcacatgcatcatctctaatcctcatcgacgttctgggtgtgggagtgagggcatccctgttttatggatgaggaacctaaggtcagaaaggctaagaaactttcttaagattgaacaactatggtagaagagctacaattctagatggttggattccaaagcatcatctcttaaccactgtactatggggcaatatgcttataagcaagtgcttactctgttggaggcactggggttatgagatagtgcaggaaagacatagttattcacttcgcaaagcttcatttttaccgcacactcatgcacacagtgctacacacacacatgcagagttactataactgtggtgtcttccaagagccctgtcactaaggtatcctcagtgtcgtactctcagtcctcctgcacttgaaccacagtttgaattgtgcatagggtaaagactgaggtcttctacagaaaggcctaagctgcttgaactttacagacaattatgtgagcaattcaaccttttatacattatgctgtagttacccagctcctgaactagtcatcaggtattttatttgttttttaacgtgatcaggaagtttctctgactcatttctctatctttgcagaggaacaaggtaggagagcaacaggggcaggaacagagaggatgtcaagcttgatgaaggttcagtaagtcaagtcataggtcaactagaagaaataaagcaggggaagatttggggtggggctgaagctccattgtttccatgacaccataagataagtggtgatctaggtgatctaggtgtgcaaaggtgaaacaaaacgaaagacgcaaacattgtactagtttcaggttttgccaagagcagattggctgccaaggctacttcagccttgactcatatagatccatgatctgggaggcaagacagcgtcctgctgtgctggacatctcagtgacattgacccaactgggggaactccctgaggttaagaaaacctccctccaaggctgagttaatgaactacctagatgtaagacaggagactgaaaccatttaagtcccaggaaaaatgcagacttaccttcttatgacctagatctctttgcaaatctaatgaaaaaggtttgttatgcacaaatgtttccctccaattttatttcaggagatttgtgctctttcctggactgcccctgaacctggaggtaataattctagatcaaagtctccctagaaccttgtaaagggtggactgagaagactggatatacagctctaggcaaccagtcctccactgccaccaccatgctttctaatctccaggggagcctggtcatcttgctggacaattgctgtttctcctgacaaaatccaagttaggaaactgacagggtctttgtttctatttctctctatgcctatctctcaaggtgccctgtcattaatgaatcttaatcctcacttttatttctcaactctggctcccaatttctgttttcccacccctcatctgggggagccaccggaaccccctcattaatccacagacagccatctcaggacttcatgctaagaattcattgtttcccactttcctgcatttgaacactggagggcaatgctggaccagccaaagcactctaggtgctccgctccatctttgtctcaaccttgcctgtcatttcaggaagcagcctctggttggaagccaaaaccaaggaccagtggagcgcccataggctagcagaacagctaggtctattacagcatctcccccacacgggatcataggaataaaaggtagctcacggaaaagcacatctggtttcatgggtgacacaatcccctgggaaagaaactgagcggggtgcttgcctaactgtgtcattaaccagaaacaatctgtgtctctgactaggggatgcagattcctacctgtcttcactcactcagatgtaagcccctggagggtaatgtcttagtaaggtctgcattcctgtagcaagcacagtgtttggcaacaaatacttgctggatgaataaatggatgaatgcgtgtatggatacatatgtataaaatggaactggccattttcagatttgttgttgttttctagctcttatgacacccaaagtttaaatcattaatcagttgctgagcattcttagtcttaaagacaactaaggatggtcaggtggttaattaaatcagtggttgtcattgtacaaatgttatttcaaacaccacttcaagagtttcaggtctcttatttttaggaagtccttcattgtgtcatccatgtgtcctcagacctcaccagcctgtggattacaaaatacagacactatttcattaatattcaatttacaagaacctgcgggctcatcatgtggaatattgagtatccgtgatgtccccaagtgatttgtgggcatttcatgtgccacagtgggtccccacggggcttgacagttccatggagccagagctcttcttcaggccatctttcatcatcttgtgagacttttctccaggctgctctcccctctaccttcaccacaatggatcccatgtcaggtggacatggtctactctcttaatcattcaaagcactgctaaatgtttgaggaagaaagaagagcacattttgagacccaaaacccaacttgagactctttctacctccaggcaggcttacgcatagcaaagaccagctcaaggcgcccggtagaagtctgcaggcatctccatatctccaagtgcagagagcagaggagattttttcttctcagttcaagactagttcttttcctgccctgggatgattgacagtgagaaaaaacatttcctccagggaagcgctctacctgcccctccaccttctcagacggggcccgaccttcatgaccctgacaaagcaaacctggtgctcaactgtcttattagatcttctaacactatgtgtgtgacatcaacagccctaactaaattcacacttgggaaaaatatgcccctcattctaactaaacagacaccatttaattttcctaacagaacacttactattttgacgcacgacacctgttttcagttttatgataacttcataatctccaatacaatgagtgagtgtttatttgaaatgagaataacctcattctcaactagttttctcaacagaagaagagtgctcaaagttcatctagggtctttacctacagaaattcaatgctgtcagcaatcttcaaggagcagctctgccaaaggaaaaagaaagaaagaaaaaaggaaatcctgcttttataagttatccctattattaaaatttctaacaaatctctccctacagttcaaacctaggtccccagagtatatgggcctcatccttctcataaaaatgctgttaaaaaaaaaaggtgtcctttgacacctttcctgagtgcaaacagagattgaaaaaaatcattctaaaataacatttttctgtcactgcccaatgggaggtgagttgatcataggtgaagcatgtcctattagtatgtcttgctcaggatgcctttggtgtgagtaagggatgggtttctagggcaaaatctctgttctatacccgcaaaaaacaatgtacagaaatttccctaagagaggagattggcagtcaatacataagactccataggcaggaagtgtccagggtcagctccctgcattcaaatacagacctgcatcagggctgtgatttccaggtccaaggctcggtgagtggataatgcctaaggcctgatgccaggcctgatgtccaggtttaacactgatggcaggccacagaccctcctgtcttgggattccaaaaagcccagaatctttcccagttcctactgacactaacttttgcccgggcaagaagtgtctgagattgcttcccttgagaccatagtcctttcttataattccaaaactaagcagccctgtttatgctgctgtggcagagcatggaatcttggttagtccttccaaactgcacccattgggttatccctggggaaatgatcacattacgttactttgttgaacactgaggactccaataaggactgtgaatcccaactatttctggtgtgggagccagggctttcaggtcattcaccagaaattatccaaccagaaaactttctttcaagttctgttcaaagtccagcagtttgcatacaggattcagatgagacttctaagaatcatctgtgtcttggatagagcaccctggcagcctcttgaaaatcaattccctaagaaacctatcttttagaagtggaccttcacaaagccagtgagagaatgggaggagtatgtggtttccaatgggagacatatatagacttttatgtcatgaatttctgaagtcagaccgtgacaaatgttggtcagagtacaatgcacagttgcccaaaggaggggaaattagcttggttcaggaggactaggaaatcctccccatggaagttttagttaaagtgacttaaaggatgaatgattttgacaaatgagggattggagaaggacatggcgggcagagggagtacagcttgagcaatgtccaggagggatatagaactgtgcttggggaacagtgatcacttggtgagagttgagtctgcctgagttggggcagtggagtggtgggagtggtgggctgtggcttgactgagaaagcttttgtgaatcacattaagggactagattctgttatatgggaaatgggcagaaatcacaggcatataagaggaaatgtgcttcgaagagtgcttggaaagattactatgggtgggaagactggttccaagaccggaaacaatgagatcagatgtaaagttaatacgaaactgaggtagacattgagaaggatcagaaggacttggaaagagaaaacagatttaagaaacacctcaaaaatagataaatgatatgtgggaatgaaagaaaagggagagattgtctcttcccgacatcctggctatgtactggaagattccctagttcccaagccccaaggtcttaccattagaaatcagtccttactcatttgtccattaaggcttaaggtgtcaatccttccaggaatgcttttatgtttctatggtccaaaggcttaatctccagtggcagaatgccaggtaccaatagaggagatttgggggcagtggtcttctcgggaccctcaaaaatcattacatagttgcccactcctcttatttataaagctgttcgtgtgaataagcacccaactactttgtctgtgcccatttgatcactgattgaataagaaataaaagccaaacatctatattctttttcttctctgaataatcttttcccctgtcttcagatttggaacaaggaaacccagatccagggaaaatattctaaatccttgacctccctatccagttggcactccagcccagtaaaatggcttcaagtacaacattcccccaacagcgaagacagccttcctgggagtcttgggtaggcctgtccagggccaccgtgcagcacacatacatcttcccaaccagctccactgtcacaaacaccatccacactgccatgggcaagcctctggccaccaatgccaccccacctgctctggtgtgggcacacctacagccatgccaccaacactcctcgtgcacatgtctatggtgtatctgtgcagtcacagttgtcaccagctcaattctgtgtaaccctaagtccaggcatcttggggtgaatgtctccttattcctttgtccattgtcctgctctccctttaaaattgttcatgagtgtattttgcagaaagatatgtgatcttgaaagacagagaaggaaagagatgaagtaggagagtggcaggggtgggggtacagattttgagaaaggcaagaaaaaagaaaggttccttgacctccatcagtcccaactcccaaaataagactggccctaaagatagcttattatttatcccaaattaaaattttatggctctgcaatcattgtgtacacagtgaaaagaaaaccatcacacaaaagatgcagttatcctcacagtgggaacaatagcagccaagctgattctgctccaagaatagaataacagtgctaagtcaggaactccaaaactttgtcaacaaatagaataatttcttggtgggaaaatggctatgaaagaaggtgggcaggaaagcaaccttctgactcttgaactgggcatgggttgccagggaaaattccagccttggtccctccatagtgagctcacaaccagctctgctgactggggaaaagtcctgcctgaatatgcacagactccagaaggccctcaccttacccttgcccagaatcatatacagaatctaacaggctgtacctgcttctcttgcctaaagttatgcatcattaccagatttccagctccatgatggcagaaatttcagctgatttttttttccattgtatcctcagcattcagcagaaggtttgtatatacttggcactcaataaacacttgctgaatgaacggttgattgattaatcaattaattgattaatttaaaatgagcaaaatactttctccctgtctggcttctgaagagtgagtctgagtactagaaactgtcagataggcaatagaagccacagtccacttggaaaaatgactgtttctacctttgctcatccttctgggcatcttagattcctgaaattcaggaacaaggacccaagagatcatgacccaccaagtgtctttcaacaaaagactattttcctggctgtttcctttcagagaataagcctcctggggctgataagcgaatggcaccatatgctgaaaacacaggccctgagtggcagagggcaccagagcctcctctgaggagcctgttggattgcagcctttcaacaaatctgagtgtgtcttttgatagcatcagcatcaaccacccccaaggacctctttcttttattgcttcagcaatgaagcaaccacatggctgttgtagataaggtggctcaagtgcattgtgcatgcaatgtaggctgctggtgcacagcactgagaatcgcagacacgccgtgtaccagcttctctacactgcgttgcccttcctctgtaagtggcccccaggtaaacgggtgtgattccccaccacttctcatttctcattttctatcatttttttctttgccagatggctcctgcaagactgaaatcacacagccttccaacatggccacaatgattgggacagatgtcaagttccaacgctaatataacattcctgatgggaattatgattctttgtgctggcatctgcaaagagctaaccaaaggtttacctatatctgctatcctttcaaggcaccctggaatcagagcactgctagttgtctgtggacagaaaattgttctccagaacccgaatccttaagcatgtgcagccaagagactgagccatttactgctgtgcactgtgggcaccattatgcatgctggatatcacactgaacaaacactgtaagcctcaagcagcctcaacacagaaaattcaaaagatccaccaacaacacacagggtgtttagtgtcatcttaaacttgcatcttgaatgcatcatcgattcattcattccaaactaaaagtcccttaaggctttcaaattgatgtactgagtattgtgaaggataccaacatatataacaaacacttctcaaataataaaatgtattcagcaggtacaatctcctcacttttatgttgctaaaccatgagaaattaaaattaaatcctgtataattacttgaatcttccagctgacaaataaaagtagtctttgatacacagaaggacaaatgaattgcacacacatacaaaattaaggccagcaattaacatcttaatgacatacccttaacttaccaacatttctaaaagcctggaaaaatattaaatatctatgtatacatgatatgtacagtaaatttatagatagatgatagatgaatggatacatagacaggcaagctgtaagaagcatcataaaaggactgagctcaagttcagactttaaagccagacttcttgagttttgaattccagaccttccatttactgactcaatagctatgtgaccttgggcaatttactttttgccttgctttcctcatctataaaataatgattacaataacacctacctcaggggattgttgcaggaattaagtgacctatagcacatgttactgtattcagagcaaagcttggaacatgaaaagcactcagtgagtattaactacttttgcttttgagtgtgataatatcctgaggatgattactaaatttcccctgtgttgggctgggttgagcctttaggaagttgttgataagaaatgtcagtctcttgaacaattaaacattattttctacattagtatcctatctagtaagaagtaaatatcaatggaaattcagagaaatacaattcaaaaggccttcaggacctttttcctggatggcaataaattattgagggcttcctatgtagaaaaaaaaaaaacagaggaaagtaatttctgcttgaccatcataaaataagcaaatataggctttgcgagatattaaaatacaacagtaaccccactcattaaatgaatagaatagtggaataatgtataaatttaaagccaaaagtaaaattaaagttgtttatgcacatatttttgaagtaaaatatttgtcctatcaacataaaaggcatagtagatgacctgaaaaagtttccacctccaagaagataacaaatcaagtcaaagtcacagtatgcctgacgttgtgtcatcctcaaaaactgggaagtcaggatcagtccaagactccagaagtgaggaggctctaaaagacacctccacttcagcctctgcttattcaaggccccagccatggaaactcgatggtgtgaactgctgagctgagaactgggggtaagtgaggactgtcttctctgttttcttttctgaagatgcagggtctcctgctaattcggattctgtgttttattcattagtgggaacacaaatcccctgctatcttgctagctttctcatttgcagccaacatatgggtttatcagcacggttagccccccaagaacagcccttcagggacatgggataacacaaaatgggaaattcttcttggaataaagagttggggaaggatcctttgtaaaatttggttttggggtcagatttcaaagtcttaaccctcatgggacaggcagagactcggggatatttggtgagtgactgagtccctattcctcctgagcttgcccttccccagggcacctcagagccagaactgctgaatgttaacatggggcactcaggtttcctacaggacacttacaactctggtaaccctgctgtatactctgccagtaaggaactacttagtaattcctccgagagccaacattcaaagactaatgccacgtcacatgcaatagggaaatgcagctctatctgtcattcacatctctgattctgtcattcattactccatgctaaaagtcccagtgggagaaattgtctttcttctttttcaaaaccagcttctactgaaggtaaagaaaagtttaggggtagaagaacaaagtcattacagaaccatgcattgattggtgagcactgcccaggggcaggttttgtggtaatgatccataagaagcaagcaaaattatggtggagtcgatggaatatttgagagtctctgccccaaccatctcataatcgaactgggagccctccaatctccccatgcaagccttggaggacagtcatagaagaaaaagtgagcaagaaggtttaactagctaacaagtgttcatcaagtatccataaatctcagggtacagaagtggcatttttgtattcaatcatgtatatattagtgtttgctatgtgctgtatcccatgccaagaaccaagccttcttccactgtgtaactcataccgtagcagggcttacagtctaatagaggacccaaatcagatgcttgtggaaacaagagaaatacttggttgtaataattatgggggtgttccaggaggaaagtacagattgaaattagaatatttcaatttcaggatgagttaggtgatgggagccaagaagacatgctaaaggaattaaatcctgagctgagactagatatgaaaaagtttgtttatttacatcccaagttcccaagtcagtaacagaagcagaattacaactcgagaaaggccccacttgcttctatgctgttttgctcagcagctgcttcctttggtggcacacagctgggaaagtgagtcacagatggactattggcagccaaaatttttttagagacaaatgacactgtgatttttcctgacacccattgaaattcctcactaatttccaaaaatatcttatgttgttttaaaacatccagtgaggcccagacatttcagtagaacaaatcagagaaacgaagttaattccagccatctgagcattctgagcccaaatcagctagactgagaagaagaatcgtttacttaccgaaggcagtcccaggacacccagcagctaaggtcctgactcacagcattctaaccaagagaaaacacaaacacagcatcttctcttttcattcacttctgttcctgttcttcagttgcttgtccaaccagctggagacacagcagagaaaccagaaagcaaagaaagcaattaggaacaggagaaacagctgataagcactctgcctaggtagaggtgaatcctgggcacccatcagggaaagactttgccattactaaggctttaggtgaggagtttgagggttacgaataagagataaagcaaggaaagggcttttctttgccaaatttatctttttttcacccataaaactcaaagaggatagggaaagaatgaatgtattctcaaatcaaaggaaaaatagttctaaaacttccaatgagtgagaaaatcagaagttctggcactgactcccatttatattgaagtaatactatgggtaaatattttatatcaaagaccccagagtggcagagaccatcagagaatggcattaaactgggcacgcatagtagccgatatggggttaatttgatttgaccttggcatcttttctcttcttaaagtcctcccatcctttctttatcctgtatagacaaagaagactggggtctaacttttatgtgtcttccatcctaagctgccagagacagtcctttgccaaagggcacagtagattgatactgcccatatgtctctgacacggctccactcagctcattcatttatctacccaagtcctacggcagcctaacatggctcaacagactgctgtttccctcagaggaatgttctgtgccagccttgaaataacaagttctgtgtctctcctggtaactatggctcaggcagggggctatgaccaggtcactaaccccaccatggcaaagaagaaaagacaaggcaaagaagccaatatctgtggagggcttacaaatgagtacctggcacaggaataagcccttcacaagtgttctctcatttcaacctcacagcatccctgcaaggtaactataattaccccatttgcaaataaggaaatcaagactcagagttgtaatttgtcccgctactggtaagtcacaaagcaagattcaaaaccatgggctagtagacctgcaaagtcagtgctccatttacatgtaggtaatatgggcactgataccacctaggcagtgagccacaagctattacaagcaggttctatccaagtgggaggaaccttgctctaggtacctagcaggttctatccaagtgggaggtaccacctgctgcagagtgccccacttctccctgcacctaaaacagtggataaaagacctggatttcccatgttttatcctgagttgctggcaaattctttcctaatctcagtcttcactagataagcaaccaaccctcttggttccttgagagttggggcgtctagaaatcctgcctggactagcaaatatctgtgagttcctaatattgaccagctctgcactggacattaggaatgcaaatataaataaggtactgtttatgttctaagtactcttaaagttcaatgcaggaaacaaacagattatcagagaatagaggtgataagtgtcatggcccaacatggcagggggccaggggaacgcctccctcaggtggagttaaagaagggagaagaaggatggtatggcttttccaggaagaaggagaagccagtgtaaaaactgagcatctggaagtctatgacacatctttgaacctgcaagtattttatgtggctaaagtgttgaacacaacactttcctacatctaaaatgtgcaccacacctgagatgaggctgcccgatcattccaacagtaacatctgataaaagaggccaggagttgaagtgggggcaaggggcttatctttgcagttggcttagaggggccttctttatcagttgaagagggcaggaaaggctgttaggatttttgtggagagatgttgggggtggggggtggggtgctgcacctgtctctcacaggctcctgaagaaaggttgaaaataacagcttttaatactgaataggccctctcattgtggaggcaggctgagataaacaggacttttactatcatgagtgctgtagctcattgcagtctttattgtgaaagtgttcatgtgcataagtcagataaagcaaggatggttttccattaccatcctaatcaaaatttccaaagcttttagagatagctttaattcttactctgtgaagaaggatgaatagagtcattttctgaaatgtttccacaactatttcaggtattgagtgttttatatcttcccttagctgccgaagagtcctggggatccgtaggggtgagcaggaaggggaaatgcacaggcttccttcatgccagttgctgagagagagcttagagacaaatacctgtggtaatgtggaatttctgagttgagcatgggtcaactaaattaaaataaaaatttttattcccaagtctcaagttgaaatgggtaagccaagaaggtctgagaccgcagggagaaaactcctggaggaatccactaaggagacaagtaggcagaggcgcttaaagatacaaacattaaacactcacccagggaatgccttcatcctgttggctctctttgttctgctcaaatatctgtctggcatcctctctccacctaaggttaaaaatcgggcattaggacacagagtagacataacgtaaaaattacaactaaaagtcaaccctcctgatatcttctattcaacatttcttccagtgcactattatcttcatcacatattttttatagggtacttactgttcgtggtattggaatgggtcatgggaatagcaaagttctaaggcaagttctattcaaagttctattctcaccaatgtgttttccatttatttttaaaagacagggcattagaaagtacaattaaagattacaaagaatacaaaaatataacggcacatatgataatgagggttagtgatttcatgtgcagtgctctaggagtttatgaaaggaccaattgctataagaaaatttcttaggttcgagactgcagtgagctatcgtcacatcactgcactctagcctgggtgaaagagtgagaccctgactcaaaaaaaagaagagaaatgttttttaaaaccttttttgcttttgtaaaaaaaatttatttgtatatacttagtgcaagcgcaaatttcttacttgcatatgttgcatagaggtgaagcttgggcttttagtgtacccatcacccaaatagtaaccattgtacccaataggtaatttttcaaccctcactcccctcccacctcccgacctattggagttttcagtgtctattattctactctgcatgtccatgtgtacacatcgtttagcccccacttataagtgagaacacacagtatttaactttctatttctaggaaattttacttaggataatgaccttcagttccatccatgttgctgcaaaatatattatttcattctttttcatagctgtttagtatatataccacattaagaaaattgtcttagaatagctgaagcttaaaagaggcaggagttggataagcaggaaggaaaaggaagggtatttcagggtgggtatactagttatctattgtcacatacaaatcacttcagaacttagaggctcagaacaacatttattatctcagtttccgtgggtcaaaaaatccaagtgtggcttagctgcatcctctggctcaaggtctctcatcaggctgccatcaaagtgttacctagggctgtagtcagctaaaggctcaactggaataagatacacttcgagttcactcatgtggatgttgacaggctgatatggtttgggtgtgtgttccatccagatctcatgtttaaatgtaattcccagtgttggaggtgggacctagttgaaggcactggttcatgggagaagatcccttatgaatggtttagctccatccccttggtgatgaatgagttctcgctctattagttcatgagcgagctgatcatttaaaatgagcctggtacctcctcctctctctctcttgctccctctctcaccatgtgacatgtgcccaggctctcctgccctgactacagagaaatggacattagatgtggtcaaggcatctctagagcaatggttctcaactctatccacatatttgaatcacctggggatatcctttgaaaatactagtgtctgggatacatctccagagattttgattgatttggtgtgggcttgaagctctggcttaccagatgactcaacctccttcccctcctcttgctcttccctccccctggggttgaaagcaactggcttaagaccttgctattccaagtgtagtctagacaaacacaatcagcatcacctggaaggttttgagaatgcagaatctcgtgcaccatcccagatccactgaatcagaatctgcattttaaacaagactccccaggtaaattatatgcatattaatgtttgagaagcactggtctaggcattcgtcattattgaaaacgttcatggaggtaaaaaaaaaaataaatcactctttcccaaatgtcacccaagaatccatacttgtaaaaaatctcctgaagggatactgatgtgccgccagggctcactgataggcagtcagtcatccccagttcagtttacagattatttgtgttactaccaatataataaatattcttattggggtgatagtgagtccttgtatgcttcttagaggaaggtattacataaattctaggttttatcatttctcattcatccacaagcaaataaggaagtggattaatatttactgagtcaatatactttttaccacaccacgatggattatccatggaaacccagaatcttgtgccacataccttcaattcaagatcaagccaaaaaaaaagatccacaaattattggtgtctgattaagtctgattgggaagaagaggaacaggagacacaagaatgtgtgcgtccagtggtccaatcctgcaggatgaatgaggacatgaagttctggcccgtgatggattggggtaatgtagaaccagaggttggcctggggtgagcatgaaaaatagcctagagacaaggaggaggaaatcctgggagaaaatacctggactgcccaacaatctgagggtctgcgcacaatgaaaaaagaaaccagacaaaaattaaagtaaaaaacctggagaaatttaaataattcctgtgcttactagcaggtaattaaggaagcattttatgtaacatctgaagcctcagatttagggggagacagggccactgaaggccctagcatagtaagggcatggaccaagtttctctgcagaaatcccgaagccaaatgagcgatatgaacacccactattatttttgtattattcattttctttttttctttctttctttttttttttgaaacggagtctcattctgtcacccaggctggagtgcagtggcgtgttctcagcctaccataccctcctccttccaggttcaagcaattcttctgactcagcctcccgaatagctggaattacaggcacccactaccacgcctggctaatttttgtatttttagtagagacggggtttcgccatgttggccagtctggtctcgaactcctgacctcaggcgaatcgcctgcctcagcctcccaaagtgctgggataacaggcgtgagccaccgtgaccagcctgtattgttaattttcttccccctccactggtaaggacaattgagagttgactaaattcttattattgttgcctccactgttctgctttctgtgattcttatccatcatgagaagggctgacttggaagagttcagagcagtgaagagaaatcccagagagtgtctgccaacactcaaaaagactttgaatttgatgtcagaataggaataggcttgccactctcaccagcctcccaagaagagtcattgggcaggctggatggctagaaaaagaagatacctgtctgacgcccaaaggcagctagaaggcatcctggcttcaggaacagtgccatcacctggctgccctcacaaagaggtcatccaacattgtgaaaccatgactatgagtgaaaggcaagagaaaataagggaatctgaaaccatgtgaatatgccacttcctctgcatcacgggacaccagagacgggcaacgaagagaatgttacttctatcatataacacattctcgattcggaaggtgccacagccttgagaaagtcctcattacaccatcttgaaagctctcagggatgatataggtagggtccaaataagaaaatggactcaaggaaatccaaattgtgaccttcactttgaacaattaaaattttaaacagaaaattagaatcgttgaatttgaaatccagaaaggatcttaaaaacaaagtaggaatcccctcattcagtttaaatgttcactaaatattgaatgagtaagtgatcacccagcctcaattcaaatattttcaatgacaattcttgtttcaaaaaatctgtcctataccaaatcaaaatttgcctcccataacttcatatctttatatttgttatgccttccagagcaacgcagactaagttcaccttcgcatattcaaatatttaaagatagctatcctgtataaccattcctcatgactgtctaataaattttaaactccttgagagaagcatccaagttcaatatattttcctgtaccaatgcaattcttaatagagtgactcatctgtagcgggtagtcagcaaatgtgagttgaatacatgaattaatatctatgtgtccacctgaccaacagttctactcgggtgtctcaaaggcacttcagctcaactccaagacttaaatcaagatcttccttgcaaatatggccctagcctaagattccctatctgaaggaataacaccatcatttcaaacccatccactgctctccatccactgccaccagccaggtcaaaactaccattttcttctttggattgtttctatagccttttgagtaagttagccggcctctggtactattcagtatctcctccccacagcagccagagtgatctctccaaaatacaaatatgatcatgtcatgcccctgattaaaaatccttcagtaacttcccattgcagataggcaaatgaccaaaatccctaaaagtcctctaagaccttgcacagtctgactcctcacctcttctgccatacctctcactcttctctccctcattttccaaacatgccttcttccagctattaaatacttgaatgtaccgggtgccttcccaccccagggtctttgcaacacttctcccactcctcatcccctgtttaactcctattgaaaggagttaaacaaaaaagatcaaagcctacacatccgcttttcagaggcatcttgagatctcctaacaagttcaggttgtttattctttaacgctttcatatatcagtttgtaatattttattaatttgattatgcctattttctcatgagtctgtaagctctggagatcaaggactatatctgcatttgcttattcaacctgacaaatcgcataaacatagctgtgtgaataaatgaatgaatttcccacattctgggacttcccagaatttgatcatcatcacagactctgggctgcagtggggcctcaagccttgccatattctcactttttaggggtctcggagactccagtgtcatcctgagctggagtccaaggcttcttagaaaccactgatttctactcattctgtctggcatactcaagagcccattcttgggcacacaggacaactgaacaggattggagggtccttcataggtctgagccagctcccacatagggaccctgaacaggtaagtaaaacctgcccagagagtctagctagacatgaagaaatcagaggggcccaaaatgattattattttctcagtgactactggctgggcttatgatgatccctcttggtgtttttcattttgcatggctattttcagtagctgtatcattaaaatacacaagtctataattatggggatgcatatcctcatccctcaaatatgtactgagcacgcacaatattcctggtcctgtgccacacgctcggttacaaaggcagccaaagctcaattcctgtcctcaaggtgctcttcctagtggaagaaacagacatgaaaatagaaacttactaacagagaaaggagcaaaccaaacacagagaaggaagtgatggcctagagatggggagggcgtctcagaggaggtgacacgggctcataacagaaaaagcacttgtttccccgaggtaaggtgtgcttgcaggttccttaagatgacccaggagggaagatgagcatcctcaacagttacacacaaacacactcaccttcatctctgatgcttgcagtgaaaataaataactgaaaataggcccaacgtgctgtctcatgcctgtaatcccaacactttttttctttgtttgtttgtttgtttgtttgtttttaatcccaacactttgagatgccaatatgggaggattgcttgggcccaggagttcaagaccagcctgggcgacaaagcaagaccccatctctattaaaataaaaagaaaacataaaatattgaaaaacagccaaaaatatgctgaaaaccaccatggcacatgtatacctatgtaacaaacctgcacactctgcacttgtatcctggaacttaaagtaaaataaaaaatttttaaattaaaaaaatgaaactaaataaactgaaattttatggaaaaatacaaaaccccagactagacacaatcagcttctttttgtgggaaaatgaatttatatcaaagctttcataggggttctataaccacagaatgtagttagttccctgccaagtaaaacttagatacttccaaaatgctgctattgtacacaccgcagaacagagcagccaaaatggtagtggtatgggttgggaagataaagaattaagaaaagtaaagtggaaggggagaggaaaaggagaatattatttccttgaatgatgatcactccttttattaataactttctgttcttattaaagagatgtcccaaacctctgggctttcccagaatttggtaccactggtgcactgacctatcctcatcctgccaatgtgaggaaacccagagagactagtcaaatcccctgcagagcagcaaccacgccagtggggctggctgtgaactttcactttggtgtgttctttgatttcatttggtgtgaaatattgagatttctcctcagatatcccagcgccttgtagctgcactggatctataaatctttatctgggctagattgaaccattttcatttatggagttgtttttaatcagagcaagagtaaaacttttgccctgtacaaaagagtcagctgtaaactgagccattctgcttcagctttcagcttctcctctgaagttgtgtctcttctgagagctctggaataaaacagctgccatagtcatctcacccttccatattttcctctttgtattagtcagctctgctatggtaactaacagtgccaggacctcagtggcttacagcaatgaacatttactttttgttcccacttttactaccaattggctgctgagctctgctccctctgtcttcccattccagagcccaagatgaaagataagccactatttgggacacactttttttttctgacaggatctcactctgttgccgagaggctgaagtgcaatggtgcgatctcagctcactgcagcctcaacctcctgggctcaagcgattctcccacctcagcctcccaagtagctgggactacaggtgtgcatgccaccatacctggctaattttttattttattttattttattttgtagagatggggtttttccatgttgcccaggccagtctcgaactactgggctcaagcagtccacctgccttaaccacccaaagtgctgagattataggcatgagccaccatgcccctccacactgtttttatgacagaagaaaaagaacaagagaaatgctagcagaaactccagatacttcttaaaacttctgctcagacacagcagacattatgtccactcacattcatcagccaaagcccttccatggtcaagcacaagatcaactagtcggggactcacacctttcctgcagaaggcactgcaagacacatagcaatgggtaggaagcaataaccctttttcatggaaagaaggatcaaatacttcagaataataattataacctaccataccctttaactccacccatgtaatttgtctccatcctggggagtttctcctgctgtcaacttaaaaggaatttaaaatgattttttttcttcttggaattcttctggggcaagatttgcccaattattcttcagaatgtcaccatccctcaagatgttaacagtggttgcacaatttaaaagaattccaccatcagataattttggcaaatgctacatattaatagcctcctcttaatatttacaattcttattaccatattaaatgctctgagaacccctgctgtaaagatacctatttaacgtgggattggaatcacagaattctttttgtaatggcacagccattaagacttacgaaattctataggcaaataccgtcccaaaggattacgcaggattcagtcagatagattcctgctgtttcctcatttctgtgcatccagactgaaggatacctaatgacgttgagaggagctatgcataaggccaatgggtctgtacaggcctcaaaaagaaggcttgcattttttgctaagaccaaactcaatgtcagaaacctgaaaatgttattcagatactactctttgtctactgaattaagtataaacacttcagactgtcttttgctccttcctttctttctgcaacaaacgtatcttgagtcctactaggtgccaagtactatgccaggcattgagtacacggtatgagcaaaacagacatgcaccctgccctgtggacttgccagtttaaaataagagagacagacagaagacagggatatgagtaaatagccagtgatcatacaacctcccagtggttagctacaccgttggccacccattcctccttgaaatgctttccacacttagcttctgagatgccactcttggctgattttcctcttcatcactggcttctccttctcagtcccccttgctggctcctcctccactacacagcttctaaatactaaagcagccagggtctatcttctctcctctatctctccctagatgatctcattcaccctcatagcattaatttcacatatgtgcccatgactcccaaatttatatctccagtgcaaaactctcctctgaggatataatcttcccccaattgaaccgccttagcacttcccactcttgagttatttcatgtgttttctcttttgccatgattgttttcatacttccttcatcctcttcctgacttataaacccctcgaggcggggatccttggtctgtttcatcttcagtttccgtagtgcattgcagagtaactgtttaatatatgattattgaatttaatgtttgaactgaatttctgctttagggatcactgagacacagatgtaatgaaagggaatattttatttaaagaaataatgcctcatccttctgtatttccaaatgaacaacctcaaatgagagaacacagctacagacattagcatgaggtgaatacttaagtttaaaaatgctaaatcaagccagtatcatcccttgtggtcacagcagctgctgctgcaaaggttttataaattgcctacattcccgcaccccatctggcgatgctggtgtgttacagccatggatgacttactcttcacaatagccttcacttggatctattccctactttaaaataaaaagacaaaaagaaggtgccaaagggcttgcctaaagtgctcccacccaacaagagtacaattcaaccacataatgctgcctcctcagcatttagaagattagattcagggccaaaggggaggtcagaagaggaaggccccctggtttgcagaaaggtgtttcaccatcagttctaataatagcatgtggcagctgcacttctggtccttcctctgcattttaatcccattattttctaagcctctcccaaggcctcctttaccagtcaaaatcagccaaggtttcatatgcccttagaagaaaagaggactgatagaacctaagtatcaactagagaaaagccaagagcttttcgtgctggatgatccgtctgagtccgggttcctgattgccacacagggaggccctgactatagtgtggacattggttcctttgcatagctccctcttgtgtatacacagaggctgctttttctcatcttgtttgccctaaaacattttttgacttagcctccacatacttgaaacttagagtttaacctgtcaaaatcagagggaaattgactgaattgcatctctttcacgaaaacaaacatcttccaactgccatggcattttagactgccctttctgctagtgttgcttccctattgcatttccctggataaacatctagtttgtgccataatatttattaacaaggagtcctctgggcagacggtggcattaggaatttctgcttggcatttggtatgctgtccagctgagtccccaaccatgttgtgagtcaatgcgaacacagcaggtttcaataaaggcaacagttatctaagcaggctgcagccgtgactctcagctcagcctctgggtcaccaatctgggacgtgagctggcacctcgttaaaaaaggtattctgacagagagatggctgtcagtggactcttccaaaaattctctttccctgggttcttctagtccatctccttggcatgtgccattccctatgcatcttttgttagactacatctctggtttctcaccacagcctggacactgctgatgggctagattgataccgtatgctttgtcatgcaccgtgatcccactcacaatgttattccagtgggatagatgctgagatggttcaccatgcaagaggaatcgtgctgcacgtagtattttctttgccctcctttggtaacttcgcaagttcccacagtcactactcagttatgcacgtgtgctaactcaggctcagactactttgcgattagagccctgccaattggatagcttgtatttctattcaataatcttttcattcactcatactaaacattcattccatagctcaatgttaagagccctttaacttgtcatatacatgatgactataacagcactcgcattctaagctaggctttaacacagcgctacagtggtgattatagaacagccactctgaactgcggcttctctagctgtggtgaatgttataaagaaagtgtatttactctagtccttgcccttttaccagtccccacacactaccaaactcaatataaaccccacataaccagcaagaatatctgaggtgtgcaggttatggcaatgggacagcagcagacgcacagtgggtgaggttcctgggacatgaccaggacactggtttatagtggcccaagctgctgtaagtctaagatcccactcaaatactgtactcactttcccacttgatggtttaggaactcttttctagcccccaaagctacattctgagccactttttttttaaacctacacagctgccttcccaaaagtatcctgcagtaattccatgttcctcctccattgtttcctcgttagctctgactccatgttctggcaatctttcagcctcattcctttttcctcccagtctgtaataaaactaagcaaaaggtagtaggtatattagctcaagaattgggatgtacctgtggaactgttgcgtgatgcaagtttttgtcaatgactatgggagcccctggcacggagggccgggcccaccacccctctcccaagggaaagaggacaagtccccatccatctgtcttctcccctcctctggcatcatagacccaccccagtagatagggtcatctcactgtctcccattggaggtggagtgggggagggtctcactcccagaaatgctcctacagctttctcctctcccttggattgaaggatgaaaggtagttatttgcttccccataggggatgaagcagggagtttccctagggttctgggagggcccacccttgtcaccaccctgtggtgccccaggggtaatcggccaactgaaggaatgtaagatctatataataaaatcttaattccacagaagtatgattccagccacaaaatttaagctctctatagacactaaacactctacatttccataagtcccaccaccaaaggaggagaaaagagcatttatattctctctaacactgcgctatcccctcagcctactcccaaccaagaatcttgagcaaaattctttgctccacttcagaggaggaaagtgggaaatgttttttcctgtgtgcagagactactacaaagagggaggggctcctgttcgggcccatttaaactaattttccatctgctcccaatccaggtttttccagttttacctctttattgggatattgttgaatggaagcacataattaccattattttattttttataaatgggcttctacaaacaaaaacacaggattagtctattattagcatgaaaacctgtgccgtggcttctctgagttctacctggggaccagcacacccccactgtcttccagcgagcagaacaaatcaaagaggatttccagagacagcaataactttacattccacccactgctctccctggggcagcaaatcttcactgtgaaatctgcaattccaggagagcagaaagcaatctatctccctccaaaaacaagttgccatttcagggactggacacattttcactcctaatggtaggtctccttggattactatggtctgccatgagcctgggaattgtaagacaaaaacagaggaaggaaggaaggaaggaaggaaggaaggaaggaaggaaggaaggaagggagggagggagggagggagggagggagggagggagggagggagggagggaaaaagaatgcaaagttgaaatatagcaagaacccattactctatgagtccagtgcgctacaggctgggttccatctcaaacacacacacagtgatgtcccaatgtaaggaatcccaactgaattctacctctcagaagggagctggataggacaaaatttctatctgaaaggtcagagcaggattaggaggagaaaccaagaacacagacttagcccatttcaactagcacagaaggacccagaatgccaggtatgatagcacctaacaaatatttactaagcacccactaagtgcccagcactgttgaaagagatcaagggaacagggagatggttggtgctgacctaagtttgtaagaagtgagcaatcaccaggcagcaaaggtgttgggggtccgcgctggtcatagagaaaggacaaggagcagaagactggccgatcccaatgccacagcaggccctatggtcacaggtgacacctcttccttgtcccctcagtacaacagtgtataagcctttactgtcctacaattcttctttttgttacacagtggctttcaaccctggctgcacatcagaattatctaaggaagttattaaaatcctgttgcccaaaacccaccccagactaatgaaatcagactccgtgggggtggcacctaggcttcagtagttcttaaaactcccccggtggtcccagtgtggggccaagattgaaaaccattgcatggaggtaattgtcctaattacctctccagcttttctctgcctctacattcctcttatctaagctgttatattgcctttttatttttagtttgttctactttgtcctttcagtagataattctataatactccattaaaccttttttcatgctttaactttgttttttctcatttaattttcatcgcccactctacttactccctcttcccattatgtttgttttgttttgtgttttctttaattcagcatcaacatttgcagggcacttgatatggacagagtacggcagcaggcatttaactgctgctaaaaattatatttaacgcagtaatattttgtgttagatcctgtgccgtggctacaggctcttgtcttatggaagattggcactttggcttcttccttggaagtagctgcattgctgtataaatttaagatccaaaataagtatattacaataaaaaataaaagaagcatccacaaatatgagggaaagaagcattaacagcagtctgaagctaaatatcaacatcacccctgccaagctcttggcctcattgtaggtggaagacgctgccatgtgcaacaaaaagagaaagggcccaggctgcatgcacaactaacgaggctgttccctgaggaaagggcatttgctgatttagactcatttcctcaaggtcctcaagcaagcccaagagtacataggccagtcgctgagacactgaaagttgagatgtggaagaaagggccaacagactgtcccagaagcagaatgcttcagtcctccagggaagctttgggggagatctgccctcgtgtcctcctacagctcagctgagagcagccctggagcctcagaaccacaggccctgtagttccctgggtctggcaaacccctgggagaacaaatcactgtcctccccacagagccagcccagcactgagaacaccatacaagccagaggatgcttgccaaatagatgcatgaacgaacgaatgaatgaatgaatgactcctctgatgaagttgtcccagggagagtttgtgggaatactgaaaaggagggtggtccccaagctggtaccccagtccttgatactctgatgtggctttttaatttctctgtcttccttttaccttgatgtatttattctctatcaatctatttgtttatttatttatttactttaggaatcaagccagacaccttgttggagcaacaagagctagagatatttgttccttttagaagaagcaaaattttccagtgccaactgacagggaagaagatgaataattacactatgtcctggtaaagaggacccgagacggcttcctgattttcgtacatcaacaaggagacgtctatgaccctggtctccagcacacctttcttggtagagttgagaattcaaccagccagttcttcctggagattctcagagccacattgagagagcagaggacttacaagtgctgccctatccatggtgactccccttggcctctaggtaagtcacacactgaagcctgcccctcccaccttccaccctggtcagctaatctaggttagtgcaggtctaacctagattacaaggcgtgctcgtgtgcataatttcatgaccaccaacaaccacatggggcaacgttatccccattttattgtccaggaaaccgaggcctggtgtggtaagtgacttgcaagtaagaggaggagtgagatgtaaacccagattcctgaatctaaattcagtggtctgtactgcagcatagctgccgcctcttgagaactagagtgggcagtgtggaagtgggaattcccaagttcccaggcctcttccagctcagtcttctatgtaaaatttttcttttccaggcttgtctgagcagaggtagagtgaccctgccgcctgttcctcaacagtctgtgcaaattcaaagaaatagagtgtgaattcaaggaactcatttgaagaacaggaaaagcaactctctccttgaggttatcggggaaatgaaggttgaaacatggatcagaagacttgctgaggtcccttccaccctcagctcttccattctgttcccaaatgaggcccaaaacacagctttctccatcactctttaatctgttggttgatttgtctggtgcacccaaccagcactgtggccctgaaaataaaatgttaattacatcaatcttacagccatccatcgctagccatctgatgctgatagaaaggcaggaagcactcgtggcagtttgcatatcagggtcagcagttcctttcttaaccctcctctgtctggcaaggctaagggagcagacgttcctgtaatgacctggcctgtctttagagctgcagccctaagagctggttttcttcctgtggctatggtcttggcactgagctccttcctgctcttcttttgctcttgtgtgtagcggaccacaacatgctttcagatcagacatcctgtgggcagaagaaattatttcacttcaataagaatttttgaagaccagtatgggttcaacgggtgcttttgggggattacaccagagataagaacagactaaatcacacgcgtgaggcagcatttacaaatcatacaacacaatatgcaatagcagcttctgagtttctgcagaggaaaggctaaggacagcaacctggttggaagatgcctcaggaacttgccttgaggctgtattttcatagcacataagattgggaaagacatcaaagaatgggaaaccttccattctggagagatggagattatgggggagaatggataaagcccccaaaaacactcttgcctctcctactaactgttcaagtctcaggtatcattatttgtatgacaaagagaaaattaacatcgttaagcaatgagccaagtgtttacaagtataatttcatttatttctcacagaaatcctatgagttatcttctcccattttacggagtataaaaaaattagttttttctagaaatcacatgaagggacagacatccccttggcaggaccaaggaagctgtggcctaattgctggccttgacacgaaggaatgactgagcacaaagaacacagcctacacagggccggaggagggttgggtctgagggcagagccctggtggatgtttctgccttccacctgggcaccctgagacaggctgtgttttttttgaagttccatcttgtcctgccacaggcccaggccaagctgactgctcctgacctggtgaagcactagccacactctgccccaagctcccgccgcatcatcacctgtcctctcctgtactgtcttctacctctggctttgatttattgttcataccagctttctctcttagtcaggcctagaggaaggttgtttttggccattaacaataaattcttaaaattccctctaaccggtggaagatataaatcacagtcataaacataatacacattcttgggacttttcaaaatgacttcctgaataatttgagatagttcaacaataattttctaagaaagacaggcttatttgagccctgctaactactcttttgatattaatacagctttaaaccctctatacttctttctgcctcaaggcttttttaatacatgtcctcatttgttacatagaatgttatttccccacccatgccccatacctgtttcaggcagggtccaagcaggagacagggcactctcggagtgattagagagagtttaatgaaagggacttttacaaagctgtggacaggtgttatggattgaaatgtgtcccccaagggacacattaactctcagtaccttagaatgtgatcttatttggaaatagggtcactgcagatgtagttaccttaaatgagttcatactggagtatggtgggcccctaatgcaatatgactggcattctatatgacagccaagtgaagacaaagacacgcagggagagaaaaccatgagacagtgcaggcggagactggagtgatacaggtgcgagccaagccaaagaccatcagagtttccagcaaaccaccaaaatctaggaagaggtgaggaaggattcccctacaggtttcagagggtgcatggccctgctgacaccttgatttcaaactttcagcttccagaactgtgaaacaatacgtttatattgttttaactacccagtttgtggtactttgttaaggcagctacaggaaattaatacagaagggttatgggaaaccaaaaagaaggtggtgaaacacccagggctggcaacaaagaaccgctgccatgccaggcctgaagcgtgtaggggaggagccttcactgaaacctgcagctgtggaagaggagttatagcttccagtgaaggaaggcactctcctccttccctccagtctcctgaaggtgtctccattggccaaaccaaatgggatggagagccggtggatgctgccaattaaggtcaggctcagagtaagaagtagagtggatgtgcagaggcaaacagactcagtctcaactgcaatgccacttcctcttcagggaagccttccctgacctcctgaccaaacctggcctctgtaacatgctcccatagtccttctgcttctgcagaatacttatagctgcaatggagggataaattatgcaaattattaagtgatgactggctctcatgctagaacataagctccatgaaagaaaacactgtgtctgccattcatcaatggcagaccctgaatcctgagggcctggcatatagtaagaatgactaggttttataggatgtgccaagaactaagcagcctgatagaaaaaggtcaagtatttaagtccaaacagattgaccttggcaattttcaaagagctatagacagcagacagcattatgttctgctgggggacagggttgctgatgatataatgtgtaacatcaaagaatgtgaccaccttgaatacttgctaatagtcctccaagagcagtaggcaggatgggcagttgtgcaaagtgaggcgaggcagaggtgggtggggagagcaactactatggggtcaagaaacttcatctgctcctatctgaatttttttcagggcagtctgttcccagtcacactggggaacttaagaaagcttagatgagtctttcctccactaacctgggaatgtaagtcctgcatccaccctccaatatggaagccacctttgctcttgcctttttgcttaccaagtgactctcttcccagcttctgctgcactctctagttctcattattaatttacctgtttgatttcaaaatttcaaagattgacctttaaactcaaaagtggaggtcccaaaaatcctaacctcccctcttttgaagtccatgtaaatttagcccgtcataagttgagatgtagtagtggtttctaagttttttacaatgtttggctttgtgtaatttaacacaggtaacctaagaacccttcagaaaagaagctagatgagctcaataaagatcaggaaactctggctcacatttggaagaccatgtttcattggattgctctttaacacatgggtaaatcacccttatccaactttgcctagagggagtttgcagtgaacacaacaatcattacaacatcttcagtctttgtgcacatgctattgatctcctcatttggtggttcttttgattacagctgtaaatgccaataattcttcttggtatgaactatgaacatcaccacatagtgtctaacatgtacatctaacctgaaactggaacaacaatatcaaatttaacgtctagggaaggaagcagaaaccctgtcaccaattaaataagctgccttaatctcctctcagttggcctaacttacctgaaccgtactattggtcttgaaggtggcactgtcatcccattagcaggcagcaggccctgcgagcctcctgtgatcagctagatttctctggggaatgaaacagctgctgatagggactgacttcctcagtcacaagtgtttcacaagtgtgttggttcagaggagggaccaggcagaaggtggttgagaggcagagctgcccctgagtgagccatgcagaggatctcctccctcatccatctctctctcttctgggcaggtaaggcagaccccagaacttgggccaagcaagactcagcagcaaagaaacatcaaggctcacaggaccttgtactcatggactgtgctccttactcaatgacctcagcccccagccctcactgagcccctctcttgtgtcttttctctcaggagtcatgtcagccattgagttggtgcctgaacaccaaacagtgcctgtgtcaataggggtccctgccaccctcaggtgctccatgaaaggagaagcgatcggtaactactatatcaactggtacaggaagacccaaggtaacacaatgactttcatataccgagaaaaggacatctatggccctggtttcaaagacaatttccaaggtgacattgatattgcaaagaacctggctgtacttaagatacttgcaccatcagagagagatgaagggtcttactactgtgcctgtgacacccaccctgctgcagctctacttctgagcagctcaaaaaccactgaccaggcgcggtggctcacacctgtaatcccagcactttgggaggccgaggtgggtggatcacgaggtcaggagatcgagaccatcctggctaatacggtgaaaccccgtccctactaaaaatacaaaaaaaaaaaattagctggtcgtggtggcgggcacctgcagtccgagctactcaggaggctgaggcaggagaatagcgtgaacctgggaggcggagcttgcagtgagccgaggtcatgccactgcactccagcctgggagacagagcaagagtccatctcaaaaaaaaaaaaaaaagaacattgccatccatgtagagcagcaattccaacaagatcgtgattttctcttgaataaataatttaggaaatagggaccagagaaagctagtgtttctacctttctttcaggctcagccactcagcttgcccgtgccctcccatggtgctcagataggcagcccccagtgggacagaagagaggagagatggagccaaaggaatgaactgtagcatctactgtgacagttttcttggaggctcataaaaggtatgaccacagagccacagtgcttagagtatagcatagattaaggaggcaccttacaatttacaactatgggtgacatccagtttttccccagccacatgcctctgaatttacatgttctagaggaaaaggactggcagtggggggaggctcctctccctccttcagatcaaatatgtacactacctgtcattttgcccaacatggaaggaaaggctacatctctagcatctctagcatgctctgttgttttgatgattactgactggatattttgttttgctttgttttgttttcttcatgagacggggtcttgctgtgtcccccaggctagagtgcagtggcgtgatcatagctcactgcagcctcacactcctgggcccaagctggatatggtgttttgctctccctttcttctctatctctttacttccacatgtgctagaaacaaaacgttgaaaaattgcttccactggcacttccttatccttctttggacagctcaatttaacactgcacttttatcttgaacaatgtgtttttccagatttagatgattgacggggctctctactccaaggctgaacctgtggcagaaatcagccttccttctgtcctcatctagaaaatctaccacttaccttgttaaataacctcataagaacttgtggtgatagacatggtcagtgacttgattgcggtgatagtttcacagatgtacaggcatatcaaactcatcagattagacactctaaatgtgtacagtttatttcacatcaagtatacctcaatacacttgtaaaaatatttgtttaaacccaaaatggattttttaggcttctttggactacttcaggcaacgtctacacaaaatgttcttcaacaaacccctctagtcaaatatcctctagtcaaatatcttccacagaagtacaaagaggctgacagggcttgccacaccttatttggtttcagtcagggcttttcactgttttgccaagtgtcttcccaatcctctctcctctcatgattctgcctgacctttcatatatataatacatgttatatatatatgttataatgtgtcgttgttccatgcattttagtcatgactgcccccatgagctcttatcatttatctccccaaatagctatattctaaaccttcagaaaatctctcttctctactcttcatcccaaactcactcactttgacctgatgcatgatcccaacataggcctggaacctgccttctacctttctgccccaccccattgggcaacttctttggttgaacggtctgcaaggccctggatactggctctgcccttggacaaaatcgggttcccaaatccccatccagatacagcactctgagctccacgatcttggaaggggtttggacccagccttccccagatgtatttaaacagagggcctgtcatgattcatcaagcccactgcctgccactcagatctaattctccttctttgaacaaatgataggcaagaaggtggagtgcatctccaacatggagaggatacaattattctcctagtttgaaatcatgatttggaaaaagaatgacatctggaaaactggttatgcagatgtcaaagttgtggagccatggttttataacgcctgcaagatggattcctagtaagaccccaagtgactccctctaacagagactgggaagagtgtctctaaggagaaggaggggaaaaaatatctggacaaatccataagactgtatgtcttccgtattaataactaatatctgttgagtgcttactatgtgccaggcagcattctaagcacttaacgtgtgttatatgattaatcttcacaacaaccttagtatttactttctattcttgtcctcattttacaaatgagaaccccaaggcacagaaaacctaaaatacttgcccaaagtagcatagctagtaagggagggtgacagatttcagactcttgatgctgcaccagaggacacagcatgtaatttggggagatgggggacccatagagaaagccaccttcaggatgtgtcagaaccaagggacaacaggggctgtgccctcaccaccaaacctgttccaattgatactcccgtgaccatctgtcaaaaaactgggacaacagaacaatggtcccaaatgacctctcaagtgttttctaactgagattttgtgatcctgacacaagcttcacactgtcttctaaaatcatctgcatctcttcatctgtgaaatggggataataagagttctaccttcactgtgttataaaatatataattatagaaagtaaataaattgcatagcttatagtagctatttaataaatgttacctattataagaaaaagcaaactgcaaggaagaataattgagaagaaagtgaactaaattactgagcaccaacgaaatgcagccactttacaggtatggactcacttatcctatgacaactcagtgaggtcattatcatcctttctgttttgcaagtgaggatactgagactcagacaggctggacagcttgcttacagaagcagagccaggatccggatctgacttgaagcctgattgtcctggctgggatactgggctgggagctgcggaatgtcctaaagaaataccttacctatagcaacatctcatgtaaaggatggctgggaacaggtatgtgaagtctggtcatctttgctcatgcaaagattgctcttgactccttggccagtttccagaagaagggatagtaggaggtcttcaactccttccccctgcctcctctcccctgctttaaaacaccaattgtaatttcagcttccaggttgttctcccgagatggctcactcccctgactgaaggaagacagctactccccagcccactgccactcacactcctgagcaccacccctaggtcagcagcttttctcccagggtacaccatgagaaacatgagagactggcccacatattccctccttctgatgcttgtcaaaggtagtctcttgttggactcccttagatcctcggggtgctcatggattcactgccttttcctctccttttcaggggcttgcctggagcgaaaaccataggggtccaaggccggcataatgagagctagaaaaattccctgggtttctgtcaggtccatagagttggtgactttaccacccacatatatctttgctgtcaagcaaagtgtgcaagtttgtctcttccgttgtcatcgacttatcacttatacagaggcagcaatggggcttgagatctgacaaccacaattctctgcattcaaaagtgagcacacgggtaccagaaaacactgcggtggatgaaggtgcaggagccaccgtgtaaagaatagaaattaatttctaactaaatgtctctgctttagttagggtcttagtccactgcagtatcttaaacaatacatattcaatgataaattttccataatgacaaggtgaacaaactcagaatcaaagctcctttcctactcttcaattcaacacattaccctaaaatattaattgaaatgataggattatacagctttttttttttgtcagagcactttattcattctttcagtaaataccatctctcatatctgcttaatttttctccacagcatttatcactatttggcatgctacatattttacttgtttatattttgttgtctggctctccactggaatacaaggtccttgatggcagagatgagtttttgtctgttttgttcactgctttaactccagcacttagaataactttggcccataacagacactcaataaatgtattaaatgaatgagggaatgaaatacatatgagtgagtgctacgtaccctgcactgagctggatgccagggacacagtggtgcacaaggctggtgcggactctgccttctgagatgttctccccaagcctcatctacccactaaaaaaatgctactgaccgtaacaagattttctgaagagttgattatagagtactctggaacaccaaataacttactcttggagagcagacatcgaggctcctaagtgcattggatgttagcaggggcaaaatgaagaaaatagtagctttctcttttctccaccttttctctcttttgagtcccaagggccccagccctgagtctgaggctgtcaaagaaaaagcgaaacacttctgttttatttcacaaaggaatttcgcaacgcttctctccaaacagactggctggggcatgctatttcacaatgaaaagccacgataacacagtttcctaaacaaaggggcgattcctaactccctctcactttatcaccactgccaccaaatgattttggtattcttcaagaatacagaatccactgggtctttttgggctttttagcaatttacacatccacaaacacataggtttatgagcggtaacagcgtacattccagtgcatgaaacactgcagggattctctgaaggcgtgccctggatgctgcaaggctccaaggcaacagtcagccagtggaacagtgtgccacccagcatgctcgacttgatagaaaaaagacccagtgacagggcaaaggaagtcaagccaacatgcaattgcttgtattaatttaaataaagccaggttctcaaactccatgtttaaataagaaatctaacagtcataagttttctttttacctgcatgcatatgggagaatagggaaagtttaaattatctttctggcttaaggacaaaattgcatgagtatttataactttcagaaaaagaaatgtcagtctaaatatattactagggcaacaaattattaagaaaaaaaacccaaagtacagtcttttggaaattaaagttgctttcatagaatatagcagcattcactcagtaacaattcattaagtacctcgtatgtgccagacgcttttctagacacaatggaagcacagctctcagaatctcaggagcttatatttcagtggaaataaacacaaaataaaataagtaaaatatatgtcagatggagataattgccatggagaggagtaaaacaggcggggagagagagagtgttgtcagcaggcttgcagaaattacaattttaaatcaggttgtcaagaagggatacaataagaaggtgacatttcagcaaaggcctgcgtgtaggcagggagcccagtatttggagtgtggatgtttgctggactccctctgttagaaataacattttcatgcacattcttaagacataatcataccagcttttctgtaggttagggagataaggagtcattttttctttcttatcttgctaagagctctttcacaagtagttcacactttcatttttcaaaatcaagcgatgaaatgccattaattagcacaaagtgtgttggggagtggacgcgagggtttggcaaggaagcagtcctgaaaagatcaaaacttacaacatgaacaggaagatgacagcactgattattgacaaacggaaaatggggcatggcattttgagccctttgccttgagtctctccctagtcacgtgaccacattctgtggactggtgagtgtttcttccccaaccacagggataagaatacaaagtgagtgatgcatttctctcactggtccccagatgactccactctagcagccccggaaaagaacctgcagcctcatctatacctgcaggttgatgtgcctcccaaaaactgtctcactcagttgtggagctgaaatcaatcatgtgttcacctcagtggggttcttggtttttcttttctggcttctccaaaaagccaatcatagagaaacctgaggactgtggagccactatggagaaggctggagtgcctttaccatccctagctcagctttagggattcaccctccaggacctctgagtgtgctgggatcacacggcctaaggtaggccctagagtcagtttctgtctttacctgccacctgacaggagtgagaagttttacttagaggcagtgagaagggaagtcagcagccccagggacagtacaaaggagacacagcctgagtgtgtgttgtcagaagctctgtcacagcgaaggcctcctcgggcataaagacctcactgtgtttgcataacacctgtgttataatcgtgagtgatcaataaaggattaactgcctcagtcatctaaggaaatgaagaagggttttatgcaccaagttcataaataaggacacagaaaaaaaccacgaaggccagtgtagctgcctctgtacgttgaaattagagaactggtacaataacaataacccacctctgtagtaagaatcaatgtaaaatctttgagttcatagctagtccatttctcagcatcaaaaccatcattttgctttctgtatggaggacgtccacccccacatatgcacactcagagtgtcagagcaatgagaaaccaattaccatcaggctccacctctttggttgaagacatagaaactgatgaatgaagaaattaagtgacttttccaacatcacacatatagtgcagacaggtaaagtgatatactgtacttctgtctctttcctccaatatcctagaagtcaagggctaagaaaagacagaaagggtaaaccatgtgatcatgccaaagtgaaagaaaaatggcagcggagtgttctccacattccagacaactacctcctgccaccttctaggtggcaatgcagtccaggtaggtaaagcgatatacaaaaataaatagccttaatcattcacaaaaatattaatgtgtgtcaaatttaaaaacaatgaattgcaaattgcccctaactttggcaagatcctttcacctaccttaaaatggacaagtttacaaatttgggctataaactgcatataagtttttgttggttttttttcttccttgagacggagtatcactcttgttgcccaggctggagtgcaatggcacaatctcagctcactgcaacctctgcctcccaggttcaagtgattctcctgcctcagcctcccgagtagctgggattacaggcaggcacaaccacgctcagctattttttgtatttttagtagagacgaggtttcaccacgttggccaggctggtctcgaactcctgacctcaggtgatccacctgccttggccttccaaagtgctacgattacagatgtgagccaccatgcccggacacatatgagtttttataagtaagttcttttagtagtgaaaaaagcataggctctggaatcagagaaaaatagaatcacaacccctcacttcatagttctgtgaccttgaaaaatgttgctttaacttttctaaccctctattccctcatccacaaaataaggataataattgcatagagttatcataatgatcaaattaaataattgcaagtaagtacctgagtgactacaaagcagaggtgctcaataatactaactccattcctttcagcacccgatggtctgcagtagagcggttcaccctctactccagacagaaggagacagaaaagacagaaaagctagaatgggagagaacatggccaatgaccaccagcatttttccaaaccaagaaatctaaagtgcctatcagcacattttttataaaaatacctcctcaggaatgttcttcccacacaacctctctaaatcctttccctgcactaatgatagtgaaggtcccaaaggcaagaccatcactgggagggtctagctccccaacaagagatgatgccctcattgcccttcatttgcagagatgaaggtgacacaggtcaatgtcagcttcaccaatagtaacagggagagtaattttttttttttgagaccgggtctcgctctattgcccaggtcggagtgcagaggcatgaccatggctcattgcagcctcaacctcccgggctgaagtgatcctctcgcctcagcctcctaagtagctgggactacaggtgtgcagcaccatgcctgggtcattttttaattttttgtagagacaaggtcttcctatattactcaggctggtcttaaattcttgagctcaagtgatgcccctgcctcggccccccagagtgccaggattacaggcatgagacctcacgccctgcatgaatgaattttttacatcaaaccttctccaacaaacttggttcagatgtctgagacaagagttgcacaaaggagtctcagtcttcagaaagttcatccttacccagctttatggatgctctaggacacatttaattcttgcatccatttaggaacagagatcttctcccatccttaaaagggaaactataatattaattactgacctgtgatgagtcagctgtccatcctcatttggcccatgctgtctacatgaagttagttttcactgtagtgcttggccaagaaaaaccaagtttttctaaatgaattccaaggataaatagcctaattcctgttctttggcttcttccactaaagaattatagggacctgatctagggaaactggggggaaaagccagggaatgagagccactgtcttgccagaaatgcatgttctgatgaggaaagatagttcaggatatctgcgccaaatcacacattggaaagaagctttctgagatctgaggaaacttccacctgctaaaaagagctagcagtctgctggaaagaaaaaaattcattcaggtgtcagaactcttactcttcactttgtgtgtgactgtagacaagtcagttaacctctttgcacctcagattctcatctgtacagtaaagagttcacattagattgtctctaagtttccttcagcactaacaagccgtgggacataggagaacaaatttgaaagattcctgagatacaggagtatggattcctgcagctgattcctttatgtgacccagtaaggataaaatcgaaaaaaggaactaaacgaaatacactcttgattaatcaaaggggattgaaagtcgtggctaacctcacacctaccttgcatcacctccagctcacctcccttgagacactcctcctcttctttaatgcctcatcatgattctcaaaaactgtgatcactcaaggttgaagcttttaatctcccatgtataaaaggatatgcaaatagagttcagtttcctgttgagtctctgccaaggtcttagcctggcagttctgggaaaagagccaaagacctcatatttcttggctgttaacattctcccatctgtgctcaagtcagcagcctaggcttcaggctgtggtttgtctttagtcttacactttcccaagttttctgaaggaaccctttagaatgttcctgcaagaaagtaagatacaagtggctcccaagaaaccagacagaggattatctggttatatttggaggcagtaagaaaaagaccaggaagtctatattcctatagtatatagccacagaatccaatcttgcaagctacttgaaatgctgatattaattaagtcttaggcagggctttcaataagtcatctgtgtctccaatatgggatgtcccacatcatgcatatgcacagtgaaaaaaagcgaggtccttgggtacagtacagcattcaaaaattaaagatctgaaaaacacaagacatctcagtgtgcttccgggctggaggctctgctaaacaacagaagcagagaccggactaattgtcccccatgtctctttgactgaactcacacaaaatagaatctaccatttttactcagtgcggggtacccagactcaagtttactgcaatgttgttaccaatattctaatggaaaattatatattcagagctatgttaaatttgaccatttattaaacatgaaatttctactttttctgtaagtgccttgtcttacttgtatttcccggtatttcccttctaaagctaactccccaaagggctttcctgtatgttctcacttccattacaaagtcaatgtacaagttaatttttttaatttctttagaaacctttataaagagatttcctccttcatttctctgttatcccaggcagctgtcaggagcaaagagctcaagcctgcactgccttggaacaggacatcagcaaaagacactctcaatctactcagaaggctgaggtgggaggattgcttgagccaggggttcaagaccagcctggacaactaagtgaggctcagtctcaaaaaaaaaaaaaaaagatctcaatattattgttccatacccagtcattcacttggtgttttctgcagcatttatttataaatatctcagtctgttcttaatccttgagcctatattttttaaaatcatactttgatatctactcagagtattgattctcttcaaatttcccacctcttagttctcctcccactctctcccaccctgagccttacacctccaacaatgatcattctaagaccatttatatctcaataggaaagtgatgtaaaacgggtctccttactctgttttggagggtttttttgttgttgctgttgcttgcttctctgtcccaccccaaactcatgtgtgtctgaaatttagcaccaccttgcgacgtttgtgagcatttttctcagagcagcattttgagactgagcctgaactccactgatgttatgacccttaaaagtgtctggctccaaaagactaaggagttcctgcgtaaatccaggtccagctacttcatcactgtgacttgttattggaaaaggttgagctatcaacatattgctcctgtaaaggctcagaactgaatcttagattcttcaggatatttgagtcctctgaggctcctgggtaaagactccaatgtagcagttctgtggactataaatgggagatatccagatcatacaccttcaatggaagaaaaagcactgtcaccttagacgactccaactctgtagtctacttttgtcttcctaatatcatacctcattctccagtgggtttatggcaagcctcatctactcagaagtaaccaagtacaagccaacacactcttgtgttagtgtggaggcccaaagtggcataagtgaatgtgactccagatgaaaaccttcccctctccaacacaaagatgccaaagactatgtataaagcaagtcttaaatcactctatatttccatttgaatatatttccccagttcctgtgcattgcttctgcatacacagaattcaatgataaaaattgagactgtctcctagatacagtaattaactcagctatcaatgccaattgactgtgtagaggggagacaattttgtaccaagatttactaacctctattttaatggaaaaacaatggaaaagctttcttcctactatgactctctctggataaattgcttgccaggaagcgttaggataattctgccatgactctttgtcttccacacccaaagacatttggtctccatcacatatggaggaaggatctccttgttcagcagtatttacaccatcaccctgacacccgcagtcagatctaactatacagcttggctaataaacctggagaagctcatattctaagaaaaaagtggagagtggtgggacagatggggcctgagtgctgggaaactgcccgtgcccactgctgacttggtcttctcaccagctgcttgatctaacagatgcatcttccttatgaggcaccagagaaccagaatgtccacatcctgtggtcccctgtacccttaacaccccacatttgagttcctttccaattcagaaaacaaaacctgcaggctttgagccaatttacaacagatgtgggtcacaacaaccaactacccaggaagcctccaccagaacgcagcgtgagaatcagcttcttagatattcccatacgtgtgatcccatcaatcatttaacaactgtcaaagagaaagactaggagactttctcccgagcatctccagggatttaattcactatgttggaaattaagagattactactaagccataagaaggctaagacagagttaaaagaattattggaaggttggcattacaactttacgtgtacactaggaaaatctgcagctctacctgtagctttgacataatgccttcctataccctgtccttgcccaactgtgactcccacatcatggtcataccctggataggcccctctctgcatgtagagcaatgtgaatggggattctgcttatcaggatatcatcactagtctgtgccaggccttgcaagaatgtccttgtactgcaactatttgtaccagatggtaccctggccacccctaagtgtgcagactttttaactttttcccccaagaaagtggtccctgatgtgcactgcctactgagtaaggctaagaaagataggaaggaagaggacaaagtgcaaggagagaaacatttttgcaaggagaaaaataatgatgtggatgcagaatatttatcatgtgaattcatattaacctgacttcctcagaaaatgtcaccgttagtattagaatgtgtatttccttcggagctctgaaagaaaatatgagaattcaaggggtgctagtgcagaatacacacacacacacacacacacacacacacacacacactgtgcttcactgtggctggaatgatgcagagtcttggcaatagttcgggaagctgctagctgtccgcccattgtaaacagtgaagtaggtcatctgtggctccccatcctcatctgtctgggccattttcttgggccctcctccacatcccattcctcatatgttctcattctatttccatcaaacctcaatctcaagaaatgacctgaaatcaattcgtactaatgtttgagtcatgaaaacagaggaaggctttagcttctctgagattggcagggagggtcgctagtgagcattgtattttcataaagataatagccataagctaaacactgcagcaaccacagcagaattttccaagcctgaggaacactgcccaaaatgaaagacagaggtttgttctctctttgtttggaggttcagtgtggatcatacacagagagtctggagcctcccacagtggacacttcttttcctctgtccagggagaagtccagctggagcagacaaccagagagaacattagcctgaccatggggaaaggcattgcagcagaattaggcccaatagaggaaaaaagatgcctggaaagaaatttcatttcaatagcaggaatagctttgtaagagctgatagccattcaacagtgaaacaagcatccttgtcagtggatgagttcggtggatgactacactgggaaggttgtctacattggttgggagctaaactcagtgagctctttccctcctagaattcattatatactgtatgtatatgattatatatactctgtgtatgtaatcgtgtattacatatactccatatatgtatattacatatacatatattacatatactctgtatatgtaatcatactccatatacacatttgtatccattacatattcaattttccatgctattggatatttttcctattcaataattttaataagctatgttaatattgtatctagagctacattatagtttactcaatcagttctcttcatggttgagcatttaggcaacttctaaatttttcctactatgaaaattattatgatgaacacacctgtacttacaactttttcattatttaaagtcatcatatatgtatatgatgatttggatccacttccacatcccattccttatatgccctcattctatttccatcacaactcaatctcaagaatatttcagtatgtgacctgaaatcaatgcattctaaagtttaagtaatgaaaacggaggaagactttagcttttctgaggttggcagggagggtcacaggtgagcattgtattttaatagcaataatagccataagctaaacactgcagcaaccacagcagatatacaaatggtatatatacaaatatacaattatatttgtataaatatatataaacatataataaagtaagctcctattttcttaattagaagattcaaagttaagaattttgtccaacttgaatatatgaaactttagggttatagagaaattagccaattctactttagatgttttaatgtattaatacagttaaacacacatattttaaaattacatattatataaaataatatatcaattttgaatactgctatttccttttaataattcataaaataactttaaattcttcacaggcatttcaaatcaatgtatttgttgccactagagccacttttttatcctcaaatatttttccagagtatatgaaactcactttgctaaattgaaaattaagaggcacattagatttagaaacataattttaaattgtttcaatgatggcacattattaatacctactttgagacacaatacatactcacataatattagaatcattgttttgccatttatcctgtaagtgaatattcatgatctccacaacaaaacatttactttgatagatttgtttaaacaatatcaaacacttgcagtcttgaaggcactggaagacccaaaaaatagttactacgtttctgttaaactacttagtcatctttttaactaattctatcagctgactgccataagcatccatgagctagcattgattgagatcattccaatgtgtcctcactaaactgtacttaactgttcaaagccaaataattaagtgaaagtatggtaatactgtttttcataattattgtaaggaatcaaatataagggatttcttcttctctgaggatcatgaaccttactccatgttcaaatagatatagtattttttcacagtaaattccccaaagtggaaatagtcactcaaacgaatacttttactcttttgacattaaccaaatggcttccaataaaaatcaaacaatttatatttttaccaacatcttgcccacattgggagtgtcaacattttgagcaaaagctttaattaaatatccatccaaaaaatggtttgttaatactttacagttttattactagagggttaaaatcctttttcaagtctgataatcaatgattaactttcttcatttgtccttcacccatttgttttttaggttgatggtgttttacttattgatttgtgtaattataataattttgtgtctgagttttacagcatttaaccacaaaaacagcattggtgaaaggagtttcaggggtattgtggatggcagcgggtggtgatggcaaagtgccaaggaaagggaaaaaggaagaagagggtttttatactgatgtgtttcattgtgccttcctaccacacaggttggagtgcattaagcctttgtccaaaaacacccagccgtgacccgctatgtatgtctcagcattgggaagagtcctctgagtgtcatgggaaaataatatatgagttttattgcccctgtgtcccaattattttctgtttactccatgttggtctacagcaatagcttcagaacataaacaaatatcaccaaaaacatcagtgatgaacaattccaaccacacatttcaatgtttactaaatatacccgtggcactgtaaaaaagaatataatggaagagtaaaggaattgggactgatcgtgactgagaacctgtatagtaggctacacactagctatatgatgaaccaagaagttgaacccaaatctaactaacttacataatcccttcctttaaagaacttaatgtccagtgcaaagcaagtgttcaaaaaagtgtttgttgtgaattgaattcatttcattggaatacagcatgcttgcaaagtcccaactttttaaaataatgtgtttctaaagaccactggtctttagaaagaccaatgaccaaagaccttagaccattggtctaaggaccatctggaagcagatccccaaggtgaaattctgacgttgaattcccaaatctaacaggtcatgtgccttgttctgatgagaaaactgtcgaataagggagtagcagtggcatgaaggttgttagtaggtagcataggccaaatggcccagtgatgtgatgaaaagtgcactcctccaaataagaccctagttactagaaagtcacaagtaggtaaacagatgccgggagggacagtttttgttggataaagtcagcagagaaaggcttttggaggagatgaatcctgagctggtgtctacagatagtgacagacttagtgcgactaggaatattatggagaataaaagaatctccctctctaactaatgccaccaagcagtcccttcaccccagagcaaaggcataacctatcttcacccaagtgaactatgtattcttgaaatatatctccttggaactaaaccatttttctgttcacttcaaatcaaccagtgttaatatcatagatctgacagcttagaaggcctgtgttctccttcactcttctcttgaccctatgtgagtttgattcaagagcatggggattagtcccttctcttgaattacaatcaccaatcagcacaccacatccagttgctctttttaagtctaggagagcaaaaacaatgcacaggtgaaggaaactatgcctaggcctcatccctaggttgtacaaagtaactgaatttatggcttcaaggacagaataaatcaaataaaatcaaagaagcccattttcagggaatagaaacaattcacagaaataacaccttgaatgaaattctcatttttagtgcagaaatggaacataacattcttagattacttgctttctaaaagtgaatattctttaggtattactttttcaacattgatgagtttacaacatttctttttgcatagcagacaaaactgtgtaggcattcacagttacagaaagaaaaaatatgactagcttcctgcttcacacaaagaaatcatgcaaaaaaaaaatttcaagccaaaagaaaaaaaaagttttaaaacattttaaagtctcatattacttgctggctgtaatgggaatgtgtaactttgtgaagatgtctgtagccatcttattctaatgatcacttatctttatcaagccattatgtccatcttgacatgatgcaatacacagggcataacattacctacacagtatttctgacataaataaataaactaaaactaatcaaacttttagttctaacaggagacaggaagctagaaaagcaaattaaaggattctacaaagaaacatctagacaaatccagcaggtgagacattccactggacaacaggttcagtcccaccaataatcaatgtcatgaaaaggcaggaaaaaagtgcagtagaggggaagcagtggaaggagaactattaaagattaaagagattttaaagatttaacaacaatgaaatgcacagtctttgaatggatccttgttttaaaaaaaaaaaaaatctgtaacagaggccaggcatggtggctcactcctgtaatcccagcactttgggaggcagagactggaggaccacttgagcccaggagtttaagaccctgtgtctgaaaaaaaaaaaaaaagaaagaaagaaagaaaaaggaaaaaataatctataaaagacatttggagcatttggaggaaaactaggaaaacttgactatgggttggctattaagttattttcgggaatttctgttaactttgttaggtggaaaatggtattgtggttgagtagaaaaatatccttttttgtaatatatactgaagtgaattgtcattttatctgtattttttttaaatactcgagcaaaacaaatagaaaatgtgacaaatgttaacaactgttaaatctaagtgatcattctatagatacttattttattaatctcttctttttggattgtttcaaaaattttataataaaatccttttttaaagtcttcattttgtgggtgggcatggtggttcactcctgtaatcccagcactttggggagccagggcaggtgattgcttgagcccaagagttctaaaccagcctgggcaacatagcaaaactctgtctctacaaaagaatacgaaaatgtcaccaggcgaagtggtgcatgcctgcagtcccagctactagagaggctgaggtgggaggatcacttgaacctgggagatcaaggctcccagtgagccatgagcatgcctctgcactccagcctggataatggagtgagaacctgtctcaaaaaaataaataataaagttttcatttttaaatggccaacaagtctacagcaaatttaaacaatgaaaatatgagatacaatatcttccttaaaaattagcatattttcttaaggaatactgctctgctcgaagaattccctagttctgtaagcgttcgaacaaattaaaatcttgtgtttatataacatatttctaagacaacaatgaattctgtcactaactatatgagtaaaatgaacaagaaaaccactaataatgatggtgcacattttagattccttttattctttttcaagacacagacataactgagatatcttaaaatcactgactttcaagatttgagataatgataataactcaagatcaagtcttccccttgtgttagaagtgggggtgggacagttccagacttccacagttgtaccaatgaaccccaatcagatgattttcaagttacttctccttcaggtgggtgggcatcagagagaagctaagagaaggttttgacaaaatccaaagtgtgtccagacccctcaaataaggtaacctgaccaagtttaatacattcttagggcctaatatggatctcagttaaaaatcctggtctcttttaattcttgtccagttgctaagtgtattatttgacccattaactctgcaagtcatgttggtccattcttcttctttacggttttgcaaaatacatcaggttacagtttcaagtatctgtcacttaaacaagtaagcatttattatttttaatgggagggctaacatattgccacagaaatatagtatgggtactgaagaaaatatacacagactctcaggtcatcactgagccttcccaccatcatcatagatccagcatctgacttccagagtaccaccaagaagaaatcagaggcagatgacatacatatccatggtccttgactctagagagtccagccaaaatgtgtgggtccatttaatcatttctacagaaatgggaggctattgctccaaatgacttctaaccactcactcatccatcactcaaagcatatgatacaattgatttaccagtcattagtaggcaggtagagagtggtgaagcagtggagagagcttggtatttacagctgctattgcaactttggtagcacaaacaacatggaattaggacagggattttcaaagtattgcccacggacttctgagcacctcaagatcttttcagggagtccatgaggtcagaatttttttcataataacagcaaaacattacttgcctttttcgttgtgttgatatttacactgatggtggaaaaacaatgatggataaaactgctggtgccttagcatgaatcaaggcgggggcatcaaatctgtattaataatcatgatattcttcactgccacatattttcaggggaaaaaagttagtttcacttaaaaatgatactgactgtattaccttgctagggctgccataacaaaataccacagactaggcaacttaaacaacagaaatttattttctcatagttctacaggatagaagtccaagatcaaagggctggcagagttggtttcttctaaggacccctcctccatctccaggcagacagcaggcttgccgctgtgccctccagaaaggatggtctttcctctttgtgtggggaacactggtgtctcttctcacagtgtgtccaaatttcctcctcttataaggacatcagtcagattgaattagggccaactttaatgacctcattttaacttaataacttctcaaaaggccctttctgcaaatatagtcacattctgaggttatgggatttagggtttcaacatgaatttggtggaaaacaattcaacccataatactgacaaagcaataacaattattaattttattaaatctcaactttcgagtacatgtctttttagtattctatgtgacaaaatgataagtacacataaagcacttctgttacattccaaattatgattgttatctaagaggaaacacttgtgtggttgtttgagttgcaagctgaactagctactttttccatgaaacacacatttttgcttgaaagaacaattgacaggcaactatggttattcagacttgtagatttgccaggcattttcttaaaaacaaatgaacagagcctgtcatattaaaataaacaacttatagttgttgctaattataaaatcttttttttttttttgacagagtctcactctgtcacccaggggggagtgcagtggtgcaatctcagatcactgcaacctccacctcccgggttcaagtgattctactgcttcagcctctcaagtagctgggattacaggtgctcgccaccacgcccagctaatttttgtacttttagtagagacagggtttcaccatgttggtcaggctggtctcgaactcctgaccttgtgatctgcccaccttggcctcccaaagtactgagattacaggcatgaggcactgcgcctggcctccaccagtactctttagcctctgtcctttgagatgaaaggcgtatatccagggagtcattgccacttcaccctgacctctagaatgaagacacataaaacagacctaaatccaactcacatcttgaagccaagtccaggtggcctgcagaccagtgagcaaaagtgatacatgtttgttgctgtaagcaattgaaattttggggttgttatagatcacaattacaacaaaaatagctgattaatacagatggtgggtcttgagaggattctaccttcatatgcttttaactctatgtctctagcaattatgaaatggcatacctaaaatttttggtggtttcctattatcctcaggacaaaacagtatagcttacttgctcccttaaatgcagttgcattgaactacttacttcctgaatgctctgtgttctttcatatttctttgcttgagatgccctttccttcttctatcccccaattggtccgtagtccctctgtattttcagggtcttagctcagttgtttgcttccctgcgaattcctaaatgactaccccagtgatctgggttaagtgctcacccttttcggaattttcatagcatccagtacttatctctattttcgcactcaaaaccctttttctttcttcttcattaggttgagacccttgagagaagtgatctgtcttgttcatccctgtataccatgtaccagcacagagcctaacccagtgagtgctcagaaagtgccttctgaacccattttaaggatgaggtatctcaggttcagggaagataagctagtaagtgacagagccatggccagatcttcccaactcccaggttctggctcagtgcctggtactaggctgccttatggaatactgccttaacatttgtttagtggtattaaaacacattggtttttaatattagcctgagttaaacatggttggtaagtttaatttgttgtgatttactccataccatatactatattctaaagctgtatagaaatgagtttcacattgtctacatatttggagtattcaagtcatgttctcttccactaagatcaattgcatctctggagaggaatcctcgaatgccacagctgggagatgtttcaaagatcatgtattcactctcctaggttttcagatgagagagtctagaaagatccagagaggtttcacaacttggccaagtcacccaatttcaaaagaacttacaagaaattgggtatctctatcccagtgcagtgatctttttggtacactaggcgaatgtcttctttggtctttcattctggcatttatggtttgagactgtttcagcctgtcagtggatacccttccctggagtggccctaggatagtctgggcaacctggtcctttctttctctgtgtagattttaatcgttatgtgagatgctcttctgcaggaatggggaagagcaggcacaaggtggatgaatcctgaagttcaactattcctggaaggagactgtgtcatgttcttttttccaggcaaactcattttcagaggaaagggacagtgttggaggctgagttgactgtggtacagttcagtcctggctgggttgaggtctcatgcttgggagcaaatatatgggatattaagccaagaaatgaaacagggattaaacaggggcatcctccaggcttagaatatttgggattgtgaactttgagctagtgttatttatctctaccccctgcttctggtattaacacacacggtttgagagttgtagacagactacggcgtgttttaaaaaggataccaggttgtttaacagacttcaaaccatgtcctgggaggaatagctaaaacatatgggagactgtagaccaaaggaagggaggtatcatagtgatcacagtcttcagatatctgtcagagaagagctggcatatcagaagacagttggattctcatgtctgcttatgcactctacctattgcagtatgttggtttggttgaaatatatgaggaaaatctggcctcacatagatatgtagtatgaaaacaaaggagtattttaatagcttgttcaaaatattgtggacatgatattctttatattgcaccataattatttgacaagaggtagtttctttgaaggttagttgcaatgtgaaatctgataccatcttagtgaacttatcatattctgttacattaaaacattggtttatcctgaaatttggatagaacgttcacccatgcatgcttcttaacccatccattagtcacttgagaaaattggttcgctgttaagcagcttccacctgttagcacacattttattattcaataccaaaatattacagtagctaacatcatcactggtctctttaagtcaggaaaaatttttaaatattggtgagctatctacttcacagtgacaaacataaatttcctaaaactctaatttttcctggaagcttagattttctaattagcaggctgggcacggtggcacatacctgtaatcccagcactttgggaggccaaggtgggcagatcacttgaggtcgggcgttcgagaccagcctgaccaacatggtgaaaccccgtctctactaaaaatacaaaaattatctgggtgtggtgggagtggctataatcccagctacttgtgaggctgaagcagtagaatcacttgaacccaggaggtagaggtcgcagtgatctgagatcgcaccactgcactccagtctgagcgacagagtgagactctgtcaaaaaaaaaaaaaaaagattttataattagcaacaacttagcttaggaggctgaggcaggagaatcatttgaacctgggagacaaaggttgcagtgagatgagatcgcaccactgcattccagcctgggcaacagggaaagactccgtctcaaaaaaaaaaaaaaaaaaaaaagagagagtgctggtggaaacccattatgtgacgtgtcttgaagcctcagcttagaactggcacaccgtcacttccactcatattctatgaatcaaaacataatgaagccccaatgtcaatagagcctgtagtaggaagccctgcaaagtcccatggcaaagaacctggaggtacacttctattacagggaggaagtgaagagttgggaagctgcattctcatcaggattcccaacttctgtttcctctaactaatcctattcacaccagtttctgatggctgcttcttgggaaagtcaccagcactagaaggagctcaatgagtctcatatgggtgagtcagaagcttatttcatcaatcagctacctcttgccatttcaaagactagtacctaaggccagctacactcaagagtccaagtgacagttctttattctcacctggttctccccatgaggccttttgctgtatgccatcccattacatcgtctgttattgaagccataacatttcttatttttctcttttcctatttgcttttttttaatcagcaaaagaatgttagactttatatagagagataacgttccttggagtttatggggcaggcatgcagctgtatgtagggtggaaagtcattacaaaggtcataggtaaaatagtcataattaaatcaaaccatggatttggataagactccagggaaagtgtgaagagtaacctttttaaattcctgctccctgttgataaatagcaacaacaacaaaattcctactcttctttcatggttaaagtttaataaggtcactttcgatgagcctatcacctatcatattgctttgttttgacagcactagaacagagatcaaaggcaaacaagaccagtgtcttgtgagccctgaggagaggttttgagaaggcaatgactgggtcaaaactctgaggtcaaacaagattaaaactgaaaatcatccgttgaatttggccagagctgctgcctctgattgctcaggttgtgccttcacaagggcatctggcagagaggagaagtggggctaaaattcaatgcgtgctctgccgccagccaaggccctgatgtggcgttgcatcttccggaaagggaaggccttttataaaccacacaaaagtgcaatctgttcgccaagcttgaacccaaggggctatctctacattcacccagcagggctgccttttctaaatcgcacaaagcaccatatgggctactggcctgaatttagcaactgggaggaggtcaatggaggggacacaattttaaatttacatgaaaaccctttgtaaactgtataacactattcaagtgtaaagcaggaagaggtgattcagaagcttagcaggtgacaggagaaattacactgaccacaagccttttctgcctaacccacagcatgtagaatctccatgagacgtttaagtacccgacaaactcctcagtgggaaaccatttgagggcagactggccagaaagcacagatgggaatggatgtgattatttctaaaagtccattctagtcacaaaccccaaggcagatctagccagtggggcagaagagccccagacagaagcacctgagccagcttggcctgacctaactgtcaggaccctttgatcttgctggagcttgacttggagaaaacatctggttctggggattctcaggggccatatagtgtgaaaccgaggggaagtttttgtaaagctctgtagcactgtgactgggggatacgcacagtgctacaaaacctacagagacctgtacaaaaactgcaggggcaaaagtgccatttccctgggatatcctcaccctgggtcccatgcctcaggagacaaacacagcaagcagcttccctccctgctttggggcctggaagggatagcaggaagttgactggaccagggagatgaccacagctgctgacctctcactcactgctgttcttccttgggtgaaactggcatttctacattttcttacagcacatttggggaatacaaaaaggcctttcttaaaaactattcttgtcttgttttcatgttgattctattgcaaaagagagttatatgagccacctcatacggaatttctaaattcaaacctctagagagatttacccaagtgctttgctttgcagtttgggaggatggatttgaagagagattgatttttttgtaggcaatcaccggccacagttgctcattctaaagctgactgctctgtaaatcacccagtgcttcatgccaccctttctcctcttgctgtgccacacgttatctgcctttaaagcagcagcactggtgtctgtaaaggccttaaccctggagtagtcatggagccaagacccacccctttgacagtgccagctttccaacacagagagctgagtatgggtctaggaagtgagagcaatgtaaaacaatagaaagcaacagttcagagcactgcatcaagtgtactgtgctggaaaggtccgccataggaaatatggtcctccatactcctcagacaacagccttccgaaagcaaacctgtccctacctgcagatgattaaccatctatgaaccggctgggtaagcaacaagtgccatctttcatggagctgagccttaaagatcctccagtcctaaagctgacgggaagaaggtaggtgggagcagcgctgaggtttttggaacgtcctcaagtgctgtgacaccgataaactcatctttggaaaaggaacccgtgtgactgtggaaccaagtaagtaactcatttatttatctgaagtttaaggttaaggcatcctccatctaaggaggcagaaataatcctgaaatgggaaatgggtgaaatagctagcatttaggaggactcctgggaagaggtgaaatatggttaatcctttccataggagaggagcagaaggtgtctgtaaaaaaagagtttggggcatatgaagggacccttctggctcagaggaaacagagaactctgcccagtccatcgaatttgggtcaggctgtagaaaccacagagtcattggcccaactccctgagcagagtcagaatggacacagaatgaagctgacttgagtccaggtggttttaccaacgtgattccaaacgttctgacctcccttatgccaaacacatcctcctggaagagctcagaactgaatccgtctcctgggcatggagggtggggcgagcgcaagtagtccctggtgttgcgatatttctctttagaagaaaataacctgtttcagacatttgtttctaattgtttgagctgcaaatgaaaactaggttactagtgagaaatatgggacattctggttcccactgagaccagattccaagcaggacaaagtgaatgtgtagtgcttccaactaagaaatgctttgaagtctccaggacacagccaggagagttccctaccactcaccagtgttcatcgtttttgcaaagagtatatggtgccagtcacttattaacagttatgcaagaatcaatgctaaggttgttgaaggattgtgctcaacacagaaggcatctttggtgtcctttcaatgacatttgaattcgaccgtgtcttgctaaaaaataaaataaaataagacagtggtctccacctggcagcagattccagttagatagtacatattaatcttaagtaagaaaatgtaataaaccaatacaaaaacccatttcgaaggtcctagggaagtctagcaataggggtcagtggtcccaaatctgcccaaccagctgttggaaaagaaacagcatgccctgccctggctgggactttggcactcagctcaggtttttcaaggtaaaagaaggctctagagagatagggtggtgatggtgggctcttctcagagaccaaatggggacaaagcagttccaggcatatgcaggcaaggaggctgaggaaggggaaggacaggcatgagcaacccaagacctcacacactgcagggagaaaaggggcaggggccctgccgtcagggagaaagacacccaaagttgtgctagtggagtcagtgcagagatgttcagacttttttaaaaaatcaacatcttagtaagattttgaaattttaactaatttgggcctttgcctttagaccttattatccttaaaattttcactaaaataagtttatccacaattccaacaaagctaaagactgattatcctaatttccctttgtttgccaagtaagggatgaattaagttcctctgtttacccatttacttggtccatatttccctaactgcggagtgcacagcacatattttcagatggagagacgttctttttatttgcatggatctatcttttaatggctatcagaatagtacaactaggctatcaaacccatgtgatttcaagtttccttttaattatattttaagttaaaaagtgaataaatttttttaaattattaagcaaattatgacagatgactatgaccaaaaaagcgggggagatgtgcttaattgaagtttgggaagtgctgaacttcatattggtgcatttcatcagcctttgaagtgaaaaagtaaggggtatccagagggggcacaacctagaatatctttgaatggcagcttctatttttaagctaccaacattggattaaagagactgcactgcaaacccagggcctttatcttctcagaagccttttgatgctttttttttccttgggagcttctttcaagttcttacttacggagctcctgggtagcacaaaactaacagaacaggtctatacaaacccacagctgtagatcccacactttagtcctctggatacagtaaacctggagagaccacttagcttcgtaaaacagaacagagaaacaggacaaaacagcatggaataaagtaatggaaacgtgtacttctatggtaacaacagcggcagtggggaaaagaggcatggtcgttgggaacatctgcgtggaagtgggccatgtgatggactttgaatgcaatctattattgtatgtcacaattatgtaactaccactttttgagtgcctaccatttattaggccactgggctaagtcctttaatgattatcacttcactcagtcctcactacgatcatgtggaattgaggtaccatgacttgcgttttatggatcaggaaactgaatcttaaaggggttcctcaagatcacacagcttagtaaagtcatcatttgaatcacctgcttgatgccagcatctgtgctcttaagaagtctgctcttccatcagggctgcagctagactagggcatgtgtggaggtttttcctgcctggcccagcctctgcctcaggtctctaatgagctccttttcaagctgaatcagaaacaacagttatgccacttcccttccagtgccatccccatcacttctctcaccaaggaagaacttctgaacccccgccaaaaccagttacccaaagcagcattccccttccccaggaggagccaggtgaggcccatctctcacattacacccctggagacccagggtccctaaatacagaaaggtccagacgatgatcagagcatcactctttccctcaagaaaaggagtccacataattctggcctcatcaaaatgtttctcagattccaaaagatgaccttcccattcctccaggcccactagcccttggcctggcatctggcactccctctcactcccagtcagcatctcccagaacagagcctttgcacctgcaagtccttccacctggagccattttctcccagggactcacacagttttctccctcccctcctccaggtctccactcaaatgtcatttccagtgaatcctttccctaccacctcatgtcactctgaagacccctttccctgctttatttatagccctcatgtctacttgaatctttatatgctcgtttactgtctgtttcccttgctctgtgagagaaaggactttgagttgtttcttactgcacctataagtacactgaaagcactaaacaaacatttgttgaatgagtgaatgaataaataaaggaatgaatgaatcagagaaaaagtcagctatggtataaagcaaaagaaaagaaaaatgaagggaagctggtaacctacagagccgagcctgagtcctggctctgcaacccatcacaggtctctgccacgaagtgccaggcactgttctgggtgccagggaatcgacatgaacaaagcaggcatgaacttctgccatattggagcttattttctaatggcaaaagacagatggtaaactaaataaataaataaaaaatatatacagtgcgttagggtggtaataagccctgagaagaaaaataaagccgggaaggagaataaagaggactagtgggagggaccagcatgcagttttaaacagaagagtcacagaaggtctcactggaaaggtgacagtggagcagagacccgaggaggtggtaaagtgaggcatgcagacctctggagagagagcacttccaggcagaggggacacagggctgcctggggtgtgtggctggaggaggggagggagtgatggggagagaatgtgaaaatgaggtcagattggtgatgggttggggagagggtggcttgtaggccactgtaaggactactgcttttggattcgaaagggaagattggggagtagaatggaagtcacacgtaacctagagaaaagatctagagagacagaaacctgaataccagtcctaacccacggccctaagaagtgggcaccctcttcatatcacataacaccaaaaaatagcttctgttctttttcagcaacctgtcccaacaatccttcctgcttgggagctctgttcttagtgcaattacattccccacgcttctagtaaaatgtatcttctctgagtttagccctaataaacattctaataattacatcgagtctctctagttcacagatgctgtatctaatcttataacctataatacggaagatgttatcctcacttcgtagagaaaccagataaagctcagtgagtttaaggaacttggccaagattacacacttggaaagggacagagtcaaaactaggttttggatcttctgacatccttctactttacaacgactaggaaccacccttcatgttagtgattctccaactatcatctacagtcttttaaggattgtaaactgatccgaaaaatccatattccctccttggtttttatgagtgacatacaggcaatctcatagattctgatgttcacgtataacagaaattaatttaactgtcacttctaagtgtgagagtgtcattgaagcttgctaaaatttgatatgcatgaatgtgttattaaaatggatggaaaaacttaattctattttgtactaagcagtttggctgctgcacaatacttggcaatgatgcaaaactctcagatatgaaataaatttcccctaaaaggttggaatgcatggtatatataacctgctaggtccctgcctcacctaagtgtagcccgaaggtggagaaccactgctctatgaccaacgttccacccttctttcctcttgatcaaaccaaaaaacatctttccagtctatattcattctctcttatttgagcacaaattctgtcagattgtaatatgggcaaaagcttggatttctatttgatgctagagtcacctcttgttccatcctgaaggacaacctctaagacggaggagaagaggctaggccagatgggacagaaaatcacatgggatgaatatcatgtgacttggcaactggggctagggttgccgtaaagggaaaagcaaggtagtttttggattaggtatgtcagctgtgccagacccctgatctttggcaaaggaacctatctggaggtacaacaacgtaagtaacctacttttccttcttatgaccactatgtttggcaattacatttgttaaatatttttctaagtcaccaggttaggaagcagtgctccagtaggtaatatagcaagggatggcttgaggaacaggaactgagtttccgataaaatccaggatggcgtctgtgcttcagtgagccgtcttgatccattgtccttcctagagagtttctattccctctacctggctccagaaagctaccctcctcaacatctatgcatccaccatgtacagatctaggccaccactgtgatcagactcacatgacagcacttcggggggtggacacaaggtgaaatgaggagcacgctgaaccagtaaatcagaggccaagttccaatctgtccaatgcattaactgacaatgcattagctgacaaactctgtgacttaactgcactgaactatagtttccctatagttagatgaaggatttccaagctgtcttccagcccttgcccactatgatcctgattatccccagaccaattcttatgaacaattgggaggaaaagcaaggaagcccaatggtgtgactgtcctattacccagtaggaattctgtgatttaatggaaaaaaaaaaaaaggcactggaaagggagtgaaaactctccctatgcatcccttaattagcccttgtgtgatcacagaggtttggaaaaatgatgccttgaggctcctttcagtcctaccatctattactctggttcaggggctggaaactggaaattgagtgaagcccaactcagccactcacttaaccacctttacagtgcctttgtctgtgagatggatctaaaaatatcacctcatagagtttatttcaataactttgttgaagtagtataaacaccagctgtttaagtaggaaagtatttatacaaatcatagtcatctgtgattattatagtcctttggatagaccccaagtcttttgcatcaatggctcttgctccaaccattgtgtccttccacctctcgctgaggcacagtcctgttgtgattgatttagttgaggcttgttgttacgtttctgcctacaacggccatttggcaattctcagcaaaatatgtgaaaatgttatcctgaagcaagatctgggagtaagagatggcaggttgaggagataatagcagaaaatctaaggacttgcctaagtgtcaaaactcagaagatagcagacatcaaaaaagctgccaaaatataatgctcagatctcagaaacccttgcaaagctctgtctccagctacacccattctgctccacccacccacttccaaacagatgaattagactgacagggagcaaataggtagcaaggtttttcgtaatgatgcctgtggtagtgctttgacagcacaactcttctttggaaagggaacacaactcatcgtggaaccaggtaagttatgcattttactacagctcagtgtgtatatttctttagggttgttgtagcgtagtcctgaatgaatggggcttcttgggaagtaaagagttccaaattagaaacccattgtttgttgcaaacagtaggggtaaaatttgggagcaaatgcattagatttctcttaagaaaatattctgtatatgcttggaaactccattctgaggcttggtattcataagttttttacaactactgaaaaaaagccctaggtcaggcttttagttttgggctccctagaaccaggaaaaaggcaagctgtggttgaggagggtctctccagtatttatgagggataaaagtcatggtcacagtgtaggaagagggaaggttagaaagaaaaaagtattacgaaagaaggagttttaaaaagaggatctttctctcctctctctctctctctctctctctctctctctggataagaagccaatcttgcccttgtcacttttttctgaacttgcattaaaccaacataaatggttcagattaaatggttctcaaggtcccatcctggcctgggtctgctgagagcagttatgagctcacctctcctgttagccctgaaactgggaactttgcacaatggttcaggagcctgtatccaatgtagaaacacagccaccaactccaggacaatagagaagtcgtggtcccctactggagacattgtctactggtagcctactccaatgtttggaaatccaggggctatattctggtagtttgggtagctgccaacagtcaatcactaagaccagtccagagaatagccttcagacaccttccaaaatgccaagtccattgggagagccattacctcttacatgattaggtattgattttgtttattcagaggaaataaataagtagggaatggtacatgaatgtggctaggctatctgaccaaaagtccaaaaagtgactggtgctgtcaacatggtctctgcctctcagagaataatataaacttatagggattctccactgcctgttgcctccagggaaatggtagaatttggtgagttttcttatctttgaggggagagagactagagcactgaaaaggagggaaacagaatcatgtcgtagctgattgtagtctgattgatgtttagcaaattgcatctgagcaaaaactactgtgtttcattttcccctaaaatcatttccacttgaaatttggaattatctgcagtgttagaatcaaatctttgaggctgtgcctttgggagtcttagggaagaaggaaattgatgaaactgatgcttagcccctctgccaggatgctgaccatgctccccgatgacactccattcgcttctctggttttcttctcctgcagtggtgaaatgtaatatgatgatgtgaagctcaggtaggggatgtgaaaattttcaaatcaaaccccaagtccttaaagctttgacagtgaataatggccctacacaactgtcattctcttttgcctggctctagcccaacgatcttgatttttggtgatgaggcagagtaattcacatggtctttatgttacattgcacatgatgactatatactcctgaaacttatatctggatccagagtcaggagaaattataaaacaaaaataagcaatgcaaagcaagcactggcttctctgacctgtgtccatgacacacagcaccagtgggctccctgagcagtgaccaatttcttgttcaaccctcaggtccttagaaagcctttcgccaagctcagggaattagaaagcaggttcgttattattgtgagactcagtctgagtgatgggggaaattaggtttctaatcaaaattctgtacttgtgacccaagagaatggaaccagagtataataagaatggaaactctttctataaccctcctctcctcaacctaacatttgttgtaagaaaggtcaagttaagtgccccatccctaccctcaagctattgtgttcttcttggatgcccctctcaataaactggaagttagattttccatcatgaaggcagctatttgtcacctgccaccctcttctcttgctctgtctcagccctgccctagtatctcttggatggggatatcaccctcacatctctatcaagcagttcaactattattagcttcaaagggaactgagactctgtgtactcagccccttggtctcatcaagagcagctttgtagttctctgagctgtggggtctctaggctgagaactgaggctggggaggcagggcacagatgttacagctcaggccccagggccagctccaggctagttacctgtgaggcactgtcataatgtgctcctgggacacccgacagatgtttttcggaactggcatcaaactcttcgtggagccccgtgagttgatctttttcctatatttctgggataatttgagtcctggcactggggctgcaatccagtttgcattataaattataactagtaaatgaaattataacaaggagacagagtattacagatgtgaaataggccagagtgaacacactagactgagtcacttaagtagctctgtaactctatttattttaatatatatactctatattaaaacaatagctcccatttatttctgaaatcttcagagcagcccaaaaaacacaaagaaatctagaagaactacactaagagttggagcattcaggtgcaagggagacagtgggagggatacttcagccccaattcctcaggaagctgcttcatctctgcacatccctttggctaagctaactagtatgcgtgcctccttgcaaactgaaaacaagtgtcctacagcttggaagattctggagaaaggtagttagcatggtcagagtaattaggtagaacaaacttttatttcagggtttaagttaaatcccatattggcagaaagtcttgaaattctgagtgacatttattacagttgttgcaattcttaggggatcagtaggactagctatgagaatctaaaacataggtgacttctaagtttataaattaagaaagactgttcaggaatggtacacacttttttggtattgtttaccagcacataaacttagcaatgtattggtgttcataaaaagagaaagtctgacaataaagcaattttccaaagaaataacacttgaaacacatgttgcaatgtaattatatttgtggactaagaaaaaaagactacaagttcttcaaagataaacgattaaatctttaatctaaattctggactacaatttcatacagcttcacgtctgggtttaagtcaaatacaaaatagactaggatgcatatggcaactatattgagtgcactccagtttttaaaaaggtttaattcagtcagacacccatttctttggttaccaagatgccaaacaatggattctataagacactttctttcaaacaatcgttttgaaaatataaacattaatgtagaaagagggattcagaaaaatgttttatcaaatcaatgtattatgctctatctgaaatgctgactaacagagtcagagcacaatatcataagtgcatgaccttcttcagacatctgtcttttcagttatattgtattattcaaattactcaaacccaatctccccagcccaaagtgatgatttgacaactgcctgatgaatttagcttttaaaattctagcaagccttaattatccaactaaatcagaccaggattaagagatactcttaaataaacaaggagatagggtgtttattttatggacaagtttcttttgtaacttgtaactcccttgaaagtcagccagagtatgtctcaaaccaaagtcaagatagtgagcaagaagtgttgcacttatgaagggaggtgagtgagcaatgcatgtggtttccaaccgttaatgctagagttatcactttctgttatcaagtggcttcagctatgcaaggaaaccaaacaggggaagttttctcaagcaggttgaaagcaggttccaagaaagccctttgaaaaatgtctaatcctttcaattgtctagaactaaagccaaaaacataaggaaccagattcttaggaataagtttcctgccctgagtgactgaaacagaatcagtcttttagttgagcttctcagcagaggaaacggggagaatgatgatggtagtgatggggggtttctctgaatagttgattttctaggaaaaccatgatcaactttggtccatttacaaagccgtgatcagcagaaacttcctgactagcaatcgccccctctcaaccagatataaccagttgatctggcagtagctctgctgctgtgaacctcacagctgaagcccaaattcagattcaggataaagcattagaaaaattatttatttttatacagaaaattagccaggtgtggtggtgtgcacctgtggtcccagctactcggaagactgaggctggaggagagtctgagccaggaggcagaggttgcaatgagttgatattgggccacttcactccaacctgggtggaaaagaccctgtctcaaaaaaaaaaaaaaaaaaggaaaaggaaaattacttattttccatttacacattcattaccaactttctgttcagcaacacctaatgtcttgattatagaccatagtaggtaaaagtacactggaattcaatgtatttttcatttgatatcaagaagcaaaattcacctaagtttcaaatactaagggccaaatttacaggagcaattaatattaaaagtcagcattaaatttaggattgaaaaatgtatcttgatcatcattcacaggttggttgtgtttcttggtttcaggtattaacagggctctttctttaacagttatttgaagatagcctaagaatttaagtccccatggacacaacatttatcacaattcaaaaacttcagtgaggcactgtgtgaaagaatcatcactacctctctcaaagcttcaagacttgtggtcttaaggaaagaaaagtatgcatgtacagggtggtagtccaaagtgaggcacaaaagaagagaaggccaggagggaagccaatcctgggaccaacattccacagttcctcttagattaaaacaagaatgaacgggcttcaattggttttatttctttaaggacttcctgaaaatgatcattgttatcctctgattaaagactcaaaggaaactatacagtagtcagtcccctacagaagaatgagtattcacctaaaggcagaaacatgtaccacctaccttcagcagatccctttccaccctttccagcagatctggaagggatggcacccttccgggaccccaacactgccatcctcagaacctctgagccagttatgcagtccttctcagaccctcgattctttaagtgacagaatgcatagcatgagcacctgccctgatctaccatccaagggcccatgcatttacaaaaaaccaactggtgcagagagatattcagcctgacctagattgtccagaggattgattaataaaacacagataatcggctggatgcagtggttcacacctgtaattccagcactttgggaggccaaggtgggcggatcacctgaggtcgggagttcgagaccagcctgaccaacatggagaaaccccatctctactaaaaataaaaaaaattagctgggcatggtgatgcatgcctgtaatcccagctactcgggaggctgaggcaggagaatcacttgaacccgggaggcggaggttgcagtgagccgagattgcaccattgcactccagcctgggcaacaagagtgaaactctatctcaaaaaaaaagaaaaagaaaaaaaagaaagaaaaagaaaaaagccacagataatcgaaacccagatgatccagaaacttctttgtagttgtcattttccatctgtgcttccagccctatctcctagcagctcctaactggaagtcaaacttactgcctttcatttctgctccccttgcctgtcctttcacagaggtggtaataagcccaggtcactaacaggatgcatggaggtctggattgtagtgtttggctccagggtaatcgaggtaatcaccactgtttaacccccacaaagttgtgaataatcatctcacctaataagttgattatatttgcaggaagtcagcctcataccaaaccatccgtttttgtcatgaaaaatggaacaaatgtcgcttgtctggtgaaggaattctaccccaaggatataagaataaatctcgtgtcatccaagaagataacagagtttgatcctgctattgtcatctctcccagtgggaagtacaatgctgtcaagcttggtaaatatgaagattcaaattcagtgacatgttcagttcaacacgacaataaaactgtgcactccactgactttgaagtgaagacagattctacaggtaggccatttctagcttcaaggagctggagattatggggaacaagaattgggtgaaagggaagttagagatgtaactgtggacaaatcattctcagtatagcatcatgctggaaataagacttaggcccaactatagcctgccattggcaggggagggaaatgcttgtcatccctaagatggaatctaaaataaagcccatcttatttcttcctcatctctcctctttacctaccactgtccccttcatactagactctgggattgaaagtcctcgtgcattctaatccagtgctaaattccaacaaagggcaatgcggcctattgtggggctaagaatcctagttcttcccgcatattggtgtgcctggatgttgacctcatggtacaatgaaaaaggctagaatgggaagcatgttgtataattagctatgtgaccttcaccaagtcacatcctctggtcctcagttcactcacccaaagtctcctccagttttaaaagcctacaatcctgtgagcctcttcattcccaatgtaaccctgaccactgctgtttgttccagatcacgtaaaaccaaaggaaactgaaaacacaaagcaaccttcaaagagctgccataaacccaaaggttagttcaaatcaaagggccaacttcagaatcaagggttaaagcaaactctgtaattgtccactggggccaaaatgtatcagatttcaaaagaaaacacaaaccatgctgagcccagttggttctgcagagcctctgactctcccagcaaggcttacctggctgtcggcatcggtttcccaagcttgcctggctgggtgtcagcagcagcctaaggtctctgacggctatctggcaccatgctggacttgcaggccagaaagaactaggcagacttggggcaggctaatatcagtgttgcaggcccaatttctggaagggaatttaatctctccctgaagccaccctcttcactctttttcagccatagttcataccgagaaggtgaacatgatgtccctcacagtgcttgggctacgaatgctgtttgcaaagactgttgccgtcaattttctcttgactgccaagttatttttcttgtaaggtaagaattagccgcttcttattcctatctctacccacaccatgctgcacatggggaaaggggatttagaaatggctaagaaaccaagaagcattggaaagggaaaatagagacatacttagaattaataaggtaggctatctcagctactcagcaaaacagcaccccatttcctgttatcctttcattttgagtcagactgaaacccattaggtagtataatgtactatttttctaatataccagagaataaccctcactttcactccagggagaaaactgaagataaataaggagaattcatcttctttactgctattttgttcatcgaccaagagaccatgggttatttgcaaggccataagtaaagctttgcctgaagactatccagaggaagcagaacctatctttgtcctgataaagggaatgccagctcacactccttaatcataggaccagcctgtctatgtgtggatcagcctgtctttgggatgaacctacacacagcattagtagtgaacagctcactattagctactcaggatgcatacacagttaggtttgagatgtcaattatttgcctgttacttgcattccgttctcaggtaatctcatacacgaaattgaaaccagggcctgggtttgcgtgtgaggcttctccccctcactccttctccaatactcacaaatgctcatcaaccccagcttctgttctaggaacaaccctagactcagagtacttgactgatctgacccagacagtaaacatacccagtcatctcaaaaagggggtccagctcacctgttattttactaacagtcccagggacacaggcagtgtggctgggtaaaaagagagctatactaagagtcagaagatctgggttttatcctgattttgacactaacttacatgttaccttagccaggtttcttcatctctctgggcctgggtttttgcatctgcaaaacaaatgagttaaaaaaaataataaccaaaggagaacaaaagagtctcatgacttgtgccaacactgatagctgaactagctgagctattgccatgtgtacatggaaagtgagccacaatagattagtgatgtctgcaatggtacagtatagcaagtaccggccaaccccagactacatgacccctacgattccttctagcactggcagtctattctataacaactttcttcactgcaggctgactggcatgaggaagctacactcctgaagaaaccaaaggcttacaaaaatgcatctccttggcttctgacttctttgtgattcaagttgacctgtcatagccttgttaaaatggctgctagccaaaccactttttcttcaaagacaacaaacccagctcatcctccagcttgatgggaagacaaaagtcctggggaaggggggtttatgtcctaactgctttgtatgctgttttataaagggatagaaggatataaaaagatataggactctttttttactcctacaagtgatacactttgaaaatgatgttttgttccttttgactttctttaccttttgaagtagaaagtgggaaccaacaggttcacagcttcattcctcatgaggcaaataggccttgggagaagaagagcgggtgcccttttatctaaacatggaaggctctgctcaactgagcactagatttgctacaaaccagcatcatcttcttcctcctgtcctcacggcttgtcccaccctctatgttcacttcaggagccacactagagattctgcatggcgtggaggaggacaaagtttcagcactttctgcctctcctaatactttacaaatgagattacatttgaatttgctaatactttatgagcaggcaatgaggtttccaaaatctcatctaaatactctccaatctattagcaaaaatcagagtaaaatacagaggaaaggcactgctttctgttaattgatttaacatgcatgaattagctccctctgagttccaggcactatgctgagagtacaaagaagacacaagtctgctttcaagcaactcactgtgaaagtgtttttgaagggaggaacagaaatgagacccctatctttccctataaaaacaacatttttactgtcttttgcctgccaatctgtatttgaaaccattggacactgattctctggcctgggactttggcattgatggttttctgcctttcttctcagcctctgcctctattgcatttattaaactgcattgtgtgcacctcgcctctggctttactctttgcagatcaccacagggggaaactcagctctgtgagctcactattagtcagccaaaagccaaattgaacttatgggtcacactgcactttcctgagccccaagcctacagaggccctgccttggagacccagcctcgggtttcctgctgcctctgctgatgccgctgttacagcaagagcaacagcagcacctgcagcgtggccagtgacctctgctactgccacccaggaaggccacagccttttccaggagcactgctcaggtgcagagccctagcaacccattattgtggttctctcagcacctatgtggagcatcaagtcgggggttatgaggttacaagtgaaagagtgactgtcgccaacaactccacttgccatccccgacagcaaactcccccatcatgtctactacaccttgtatgtgtaaggaatgctgatttccaaaacattcacgagttaccttgtgtaatattagggtgtttcctctgaagttgttaggaacaaaaagatcatattctcatttttcagataaaacaaaaatgccctctcctcaaaaaagtatgtatcatgtccagagtcattcagtgaggcagggatattgctgggagcagaaccaaggtctcaagattttcagcccaaagttcctgctataagaacatactgcatccccaaatgaggacaagatgtcaaagtgagtatcagctagaatgaacttcaggattgtcccatatttagcatataaatgagccaccctctagcccactatgccagaaacaaaaaaaatcctggcatatcacaggaccatgaatttcccacaccaaaaggagcctccagggaagatttaaggcaagagccaggagggattatggctgccttctgatctggggccatgatatgtgaactgtgagatggacatgtgtcacactcagtaggcattagaacagaagccccagaaagccaagccacatgcccaaggtctttggctccctcatcccctgttctttccattgttctatacagtggctactcttgtccactgtttctgaagagcacataaactgctgcccaaaccactcactgatagagccacctagggtacagctgcagaagagagccctggaagtgtaacgctgcatctctgggcctgtcattatccaggtatacgactttgagaatgtccaccatgtctctggactgcagtgtagtttctataaaataacatgtaaggcctcttctatttctaagattatatctaataactctaatagttctattaaggcagataattcaagagaagaggaaggagggactgattcccagggactgagggtgtgtatctatttcaacatcacatagtcagtttgccccagaggaaattttctctgccggagacaccactgagcttcaaactcagggacttggcagctggaattctggaagtcacaactttccaggagtgcctcagtgctctgcagtgaaaaaaaagaaaatgttctccaaataaaataagtaaaatggaggtgtcaaagaacatcaaggagaaggtggctggatataaaaagatgcgggaaaaaaaaagtaaattggtgaaaagtcttttaagtaaataactttgtgtctaacttaattttttttttttttttgagacagaatctcgctctgtcacccaggctggaatgcagtggcaccacctcggctcactgcaacctctgcctcctgggttcaagcgattcttgtgcctcagcctcccgagtagccgggactacgggcgcgagccaccacgcccggctaattcttgtatttttagtagagacgggtcttcgccatgttggccaagctggtcttgaactcctggcctcaagtgatctgcccgcctcagcctcccaaagtgttgcaattattggcatgagccaccacatctggccctaatttaattctgcaatgaaaacagatcaattcataataatggataaatggtggtggtgactaaaataaagacacggctgacggcctcgccttagatgggccctttacctgcacctgaacctgcatcctgaaacactcacagaaaatgcagcacaggcttgtcaagcccctttctgtatcgggacgaccagggcaccaggggcacgaagacagcgctctgtaaacatgcagttctcctttgcctaccaggagtcattcaggtggcaagggccccgtgagtcagaagtggggagatactctgcttctctgaagccagggtgctcccctggatctgaccaggccatttatttctcagaagacactttaggtcacttctaaaggccaggctggaacccaaaatggctaagagaaggatgccaagtcccagacatgacctgccctaagaggcagctctgctgagctgtgccccaggagtttgtgttatgacttcctgggcacctgcatcatagtgctaaaggcacagtagtaagtggcactgtcttcagtccttactggagagatcaccaagtgaaaggctttctgggtcagaatgtgtttcacagaaaaccgtccttgagtaaaatctgcaccttctgatctgctgttatccccataaaagacaaactgaaaggaataatctggccttatccggtaccagaataaatctggatttgaatatacagtgtcgtaagtgcagagcagtaccacctcactgccactcgccaccgtctggtccggggaactctgggttactttgtcacacagcgtgcccctgtctgggaaaaagacaatgaggaaatagtgaattctgcaccccccagacagtgagtacagcacatgcctagcccagaagaactcaatgagcagaggcaagagaaggacacagaaataaagccaaaggcagcaaataaccaaaaaccaagagtgcaagagaaaaagccttcaagagtcagagaaggagaaatggggttatagagcaagtggaatgtaaacaaatgaaactacttacagaaaaacaaaaagctaaagcccacagtaagaatcatcttttcttcatatcagggcagaggatatacaacaaaacagggttcctaagatctcagagactatctgacggttctaatgaaagaagacgggaggaaaacaagaggagactggcagcgctgacggtcatgtgactgattcagctgtgacttctagaggcaaatgcgctcagccaaggaaactgctattgctattatgattttggccccaatccatcttgaactaacacatatgacaatgaaaaatggattacttttaaaaaagaaaagaaaagaaaaacaaaggaagggagagagagaggaagtgagggaggaaagaaaactgcaagactaatgatggcgttcttggatatccaactgctacaaaagtagttcactctccatttctgtatcctctggtcacagactggtgtactagtccattaatcacatgtcgtactttgagtgacactgtctcatagcatctagcacggctccacacactttgttctattcaataaatggaataagtgaaagagtaccttggacaactcccttactcctctgtgtaaagaggaaggaaagggggttggaccagattctttctaaaatctgtcctagacctgaattccagaaatctttgatttcagatgcttgagggagtgtcctgatcctaagtgcttcttgcacttcaccagcttgactttccatctctcactgggcccactgcagcacacacttggctccagctggaaaatcctgaacagagcttcccggcaggtgaactgccataagtgggttataagcttgctgagatagtgttcagagtgcccatgtacctggggtggctggagcccctgagccagcccctcccagtcaggagcactacaaatacagttttccatgtaagccatcaatatgacaacagttgggaggcactgctgtgaaaaacagaacactgactaactcactccccaaaatgcaggagtgttcctaggagtatttctagaaggtccttcatttccctttttccctacatccacttcatcagtaagacctgtcagttctaccatgaaaatatatctccaatccatctacttcttccatctccactgcaaccaccttctataaacaccatcatctcttacagggactgcttcaataacccactaactggcccccttgcttctgctcttgtccctggacaatccattctccagttcttcataaaatgtacatcagatgatgacagctggacctccttcccaggcctgtaacatctgcaaacgatctggcccttgcttcctccccagcctcacctcacatctgctccttctctttcttcccttcagctgcagtggccttccttctcgtcctttctatgtctctcttttctagctacctgaaactctgtctccaatttttcacagttctcagctccaactaaattagtcacccatgccacccataaccaacctcaattacatctctgttcttattttccctcacatcactatctgaaatcatcagattcatacatgtttattttatgtctctcccatctcacctctcccctacacacacacacacacacacacacacacacacacacacacacacacacacacgataatataaactatatgagggcagggagcttatcttttcactgatatgtctccagcccctgggcttgtgttgaccgcatcacagacaatcagtaaatatctgtgtaaaaaaaaggaatgcaatttcttcacttaaaaactcaccattcacctagatttaggaaataaaaatacaagacacccagttaaatgtgcatttcaaataaacaacaaaaatttcagtaatacgggtagctgggacatgccatatttggaacacatttatactaaaaaagtattcattgtttatctgaaattcaaattccactgggcatcctgtgttttatctggcaatgctaggcatgcagaataccaaaagtaagcaccaggcaggccagagtcccaccatgagcatcttcagggcccctggatgtggaagagggatgttgagggcccaggggctgccttgccggtgcattggctgcccaggcctgcactgccgcctgccggcaggggtccagtccacgagacccagctccctgctggcggaagtccatttcagagcttccggttctcccaagtccaaggattatgctcactccccacccacagtctcttagtgtctgtccctgctctaaagatgttgtctgggcttgatattaatatgagagctgactgttcccttcctgatctagaccataaccatcttcaagttaaattgctcctcctcttctaactgcccaacctcacccacgtctgaccatacccaagcacagagaagtgggtttaatggaccttcacacagaaggacacatcctctcctataatgctttacatggaaggttcagacataacctgagtcctgcttggggtagcatcatcatgactctcttgccctggtgtccttgcaatattccttgaaaggcatccctcccccaaggaagggcaggcactgagcacagcaatgcagtataatggctaagagtgggatcccggagccagcctgcttgggttcacatcagctccggcttttaccagttgtgtgaccttaagcatgccctaactctccaagtctcaattgctccatctgcaaaatggagatagtaatagcttttctcacaggactattggaaaatttagtgaggtcacacatgcaatacacccagcagataaatgatctatgaatgtcaggtattgctgttgcatatttaatttaaatgttgccatttttattaaatagacatatgaatagagttcctaagagtgttactctcatcaatgctgctcagggaaaagatgctgagtaaatctaaattttaaagttgcaaaatctagcaaaagattgttgatatgttgtatcaatcaatggttaaaaaaaaaagactgacatctttaatttgctttcagtgctgcaagcatgtcctagagctccgtgatcccctgagacctgtgatcctctgagacatgagccagctgtgctctccccaagtccctaagagcattaggagcatgagaagtgagcattccagccccttgttcttatgtcttccaaacattgtaacaggcttgttcatgagaggccacaatgcatgatcaagtgaccccaccactgaggaataggagaaagcctcaagattcagtggcccactaaggacgtattgccctaagtttctccaacccatcttcctattggcatctggagactatgcctcttcccaaggtgctgagggtgctgcagaccccacttgccctgcaggccccacccgcccaccagcgaagaagggctgcctttcattagcccaaaactgccactcaagaggggtcctcagacaaggtgggagccaagagatttggcgaacgtcacccttgtcccacagcttggatcttgatcactcatatcactcagaagagggacttttctctcttgtttcctttgaggtgggcggctttgtttttgacattgtagcgccctctgctgctactaattatcgcatctccataaataggtcatactggaggttgatagaaaatagatcagggaaggaaaacattctttgttcacaattcaagtcaaagctgctgcttctgtctccattcccttttcaactctgagactggcagctgcttctctgttggcccaaagggactatcctccaccagtcacccaaagaggactgtctttaaggatatgagatagcaccctaagaggataaatggacattttcttgtctacaaaaagcctaatgcaacagtagaggacatagggaaatttctttggatggatagagacaagtgcatctctttcttacgaaagaatagaaatgtgattaaaaaggaaaagcctagaaacatctgaacgtgtggaaatgggggtgagtgggctagagaaaggatttctgcatcactttcttcctgtagcaattccatccgagatccctgggacagacctggcctgatgaatagcaggaagcacaccagggagggacaaggtcctgcagacaaccttcaccaccaggctgggacagcgccatggggacccagggcctctgctttggggaaagaccttgctgagggccccatgggcaagaacaagtgtgaagaaccctactatggttttttgcccaatgccctccacaaagccagcgtttgaaggaaaactgtgaggaagaagggacactccatggtgttgttgttgccaccgctggagcagcctgtagcaagaacagtcttggtccaaccaggtcagtgatactttttatgatggggctgtgtgggacctgacctgactcttgctaaccagatttctaaagccatctgcagggtcttttctcctattattccccagggcagggagggcaaacagattatatctccattatcaagagctaacaattggtagagactatgcggagcatgctggtaagaaagattctgaggccacatctatactcagaggaagagagtgatgtgtttattagcaatatttaccaagggagcagaagcaggaggcaaccccacaccattttgtatttcccattcctgctctcgatgtcattccctgaaatgagtcctgcagagaaagaataatcagagccaattctccattggattgtccttttggtaaagggcaaatttttccatttctgtcttttccatggaccatttcccctgctatcaattgctgttgcctgcagcctaagaaataaaatttttaaataaatgagaacgttctataattctctctaaaatcataaacaatgtgtcaaggccaaacacttccctggtgtgatttattcctatgtggactcatccttgtataattagcaggaataatcacaccctgagccagctggcagagcccctggggacagagaccacccaaagaaggtccttgttctcctgagtcacataaagggagtcacacaaggcgggagtggaactcaggtgtccggagttctagtcccagctctgcttctacctatctacatgaccttgagcaaatttatcccgcagagcttcagcattttcatctctaaaatgagggcattggcccaggcagctgttaaatttccttccaagtctcacattctaggatgctaatgtgtaaaattatagaactgacccaagagttattagttcatatccccctgtgcatgttgcttgaactcctcattgcccagcaggaggaaaagggaaaacatgtttcttcattggggggtagcataatttcctggttgactatgtgtgactcatcagagcctggcggtccaagcccatatgccatttgaaatccggttattattacatctgggagagagaaaagtgctgaaaacagcctttgggacactatcgatttggccaaaaaaaaaagaagaagaagaagaaggctctgtctagtgtgataacattttgttatcttattcattgtcttcatccctgaaatacactctgctctctcctatctctgctctgaaaggcagaaagagggcagccctctccaaggcaaaatggggctcctgtggggaacagaggggtgcctctgtcaacaaaggtgatgccacatccctttcaaccatgctgacacctctggtttttgtaaaggtgcccactcctgtgggtaccgggttaataggaaactgacatttggagccaacactagaggaatcatgaaactcagcaagtaatatttggcagaatttttttttctatctgaaaattatcagtgagagattctaatgtgccttaacaaacaggaacaaaagatgagtgtttaatacaattcaatttaacaaatatttattaagagcctacagttattcccatggatcatctgagtcagtttccgaggaaacattatcgttgccttaagggagctggggggttgtcaacgggccagaggtgggatgaaaaatgacaacagatttacctctgggaccgggacatggttaaccacagcggccctgggtaagtagcttagcttcagaagaaaatgtgcccaacagcatgggtaacctaaaacaccgggcaatccaaatattcttttatgattggctttagcatgtattttattcttttgtagggcaggtttatctcaccaattatatattttcttaactgacctgtaaaatctacaggggaaaagtattttaagaattatatgtttctgcaattaggctcccagcagtcaacaaagaagtggtactttttgtctttccagtgatgaaaaagggaacctggcatccctggtggcccaccagcgtctccttccctggcctaggtcagaacaagccgtaaatcagcaggccgttatcttcttataaatctgtagagcagggtggacaacaaaaggcagcctgctaggttttcagaacatgagttccttgtgtagccagagaacctgggaccatcctgacgtggctggtcctgctgtcctcacagcctgaatcccaggctgtatgaataggagaggttcaagtccagatgactgttcacgatgctggtcccccttgcatccctaatcatgctagagacatgaccagggtctgagaggaggaagttacagcacagcaccaacaggggcttttggtaaagggcctgggcactatgtgaagatcacctagatgctcaactttgggaaggggactgagttaattgtgagcctgggtgagtacctcaactccagaggtagctttagcggaacccctctatacctaacacctggcaatcagagggctgaaacacttggccagataatgaattctcttatccggtgggaaaaggctgtaaagatcaaaccacctttcctatgggtaagcaagagtctgtagtttatgtaaaggcagcagctcctgtgggaaggaaggaaacaggaaatttacatttggaatggggacgcaagtgagagtgaagctatctttaaaccaaaggtgtcaggttatttggtttggtttttgaattatctggaagttccaaagaaagaacacttctccctgaggatttgattgcaaaattctgacttcaaacttctaaaaagatcaaatgttaaatcagatagtaggcttggaaaactctatttctctatgtaaaaagtagagaactacttttcttttgtttgatcattttattttgtttaggaaataagaggattagataccctggtggtgagtggggagggcagggacatttgcacagcatttctggataaattagatccaaataatcaaatcaaagactctcagctcagaaagtaattaaagatctcctcacccacctctttaattttgcaaatgaagacagtgaaactcagagaggttatgaacttgctcaaggtcacacaactgatcctgatatcaaggtccagggcaaagccaagacagctcatagttctcaccagcccagacccaagggagaaaaaaacatcatagtccttggccacggcagcatcatttgcatcccaaacattctttacccaagacttaatgaactcaaaaagaaatcctgagttccaaagggaaataaaatcattctgcgtctgttgaaaaaaaaagcaagctaaagtggaacaataattgaacttgatattaggggaaaggtgcagccatctgcagactgagagaagggtgaaaaaaacaaaatgaaaatgctagtcttgtgttcagacaatgattatgaccatagaacactacctataagttctgtagagctaatttctttcccagtgggttgatattctatgatagattgcatcagcggtgtgattgttttggaccatagaatacgtatacagaattggcttgttgagccttctggtgtcttgaagtgaaaatcatatctctggacatatctgtcaggcctgaagccctaggctactggaaagaaagataccatgacttatccttcctctaaagcttagaagttggagaaaaattctagttcttgggaagctctgcaaagcagggttcgttaagctgatgccacaggtttttgcaaagcccctcagcacagtgtttaagaaaccagtggctctaggttgacctttggggaaggaacacagctcacagtgaatcctggtaagtggaggggagcattgaatcctctgcctgaatgtatccattttatgccaatgaattgagatatggcttcttgccccatctctgccacattcaagtcctgcttggctaaacaatgctcacggatgtgcacgtgtgcagtgggatgcagctttttctaacctctcacaaaatcacgcaaccccttcaccaaactgcttggtggctcttctgtgccctcacagcccttctagtttagcagttagaggaagacaagtgcccaagggctttctcatttttaggtcattgtggaaagaggaacgttggtgatatgtttgcctgcttgggaggaaaataataatgatgatttactcattggtttctatatgctagttgatgtgctgcattctttctcttatcacatttaatccttataccaggtctgtgagttaggtgctattattatcctcattttatagaagagatatatttatattttatatttctatagaagcacagagatgttgaataacttgttcaagccgatgaagtaagaaagagaacctggagtttaattcttggcactcagattccagagctaaaagcttttcagtgaggggattatgtctagagggaatgtccctgatgctctagtctctaaggttgctaagataatcgctaaagaactgcgctctcagcaagtaaagccaggggttggtcaacaggaccacggtgacccagttacatattcttaatccttacaacatcatcaagcagttgctgttttccccactttacaagtgaggaaactgaggtgtagcaagttaggaaacttgtcctgagttttaaactcaagcctacctgccccaaagcctgagctcttttaaattaactgcaactgctgaccagttagattaactaattacttaattaataagataacaacctaacaggctgtaaggtaaaaaagtaatcagatttgttctataggtcccctcccttttcgggaatagctatacaattgtataattttatgcttcccctgggagagtgggtggagccctggctcccagcccgtgatggaagggtcttggcagtatttgtaaagcagtctgtgggggtgtaactcagggcggatctgaaaagctggtctttggaaagggaacgaaactgacagtaaacccatgtaagtctgaataatgcttccaaatttctccctggaaccctgatttccaaattttccattctgttttataacccaggtccaaaccacagcagtcccattaatggattccagtgcaaaacaactgctggtgtattcctactacacgcaggtctctgttgtttgccctcatgtgctattttatctaatagctgagaatgacagtaccaatggagcactgagttaaggagtcagactgttcgaaggcttcattcttcgttataattggtgagattttccatgggactaagagaaaattgattaactctctgagcctctattttcctcctctgtagaatgggggaggcagttcctgttcccattttaccacagccggcgtgctgtgaggggatgttggtacatttccaataaggggacaatgagtgtgaagagaaaggaaggccccaggtggtccgtaaactcttccaccagtcccacactataaacagctggttttatcagggggattcttggatgacaagtaagcacttaagtaaatatcaaggggagtttgggcaactgagtttttgtagatcctcgtgtcattgtgttatactggagccaatagtaagctgacatttggaaaaggaataactctgagtgttagaccaggtatgttttaatgaatgttatttgtttccaaacataagccaccatccttagaaattcagtgaaagataaccgaatctcctgcccagttattagcatctttcaccatgggtctttctggagaaaatgacaatgtgggcagcccctgactgcagcccctttgggactgtttctttaacacctttaagtacttgggaatgttcagtgtgtttttgttaatgttggagatatgtgtctgacaaatggaatctgaattgaagttttagtgtgtaggggcagaaagcatttagaaaggacaaaagaaggacagattagactaaaatacataccaatggctgggagtatgcaatgcaacccaatccaaaaggaaacagtgagatgtagcctgctgattaaacaactgagccagcactccgtgtcagctgacttgtcttcccaaagcttccatgttggtgcaattaggaaaagaattgtctaatccccataactcaaaatcttggagccaagctaaattgggtaaagccgtgtaagattttctggtactgacactgactacaagctgatatttagggaaaagttaagattgaaagcaaatattcaaattagtcagaaagaccacgaacttctgaaaacaagccccagggtgctgttaactgctgcatttctaattgggtcctcatggaacattttcatctctgccttgtctgagctttctgcaccagagaagccccttttgatacccactcacttctgagtccctcattgaaaaggtggcaactaagcttagagaaggattccctaatccaaatgcaatacttgggggaatattttgagtattgctccaccattctcaaaacaaacctaatttcagttaacttgaatgtagctgaaattttgttccatgagggaatctctgctttctatgataatgcaagctcatttcaaacaattgtttgggatttaacttttgctcataattcccaaaagataccaactattcaatgagtatcttaaaataaaactacttttatgaccaaattattatccccattagaatggctagaatcagaatgtcctagtatgtattatgtgaaccccatgcgaccttcctaaagtttcttatgcctaaaacagcataagagagaaaagcatttccacgctaacctgtgtgttcactggttaacaaaggtctaaagagcaggtgagtcagctgctccatttccaaactggactggacatttacagtcctgcagatactaaaaatgataatcaggaaaagcacacacaattctactttttcttataattcccatctttcccaaagaactgttataaattctctcccaaaggtgttatattcatccttcttttgttgcctctatttgtgatgtgtactgaggtgaaatatttgttgagattcaaaaaccccatgagatttaacttaagctttccctgtcagagagattctaagagctaaaagatgggaagctggtatttgggaactagattaaaaagaaaatccaaattaatcccaaggagcaaggctcaatagatagttatttagacataacatgtccaccctgcaagcctagttgctcagttgactgggctgcccctatcttagtcttgcctggaagagaaataagttgtttgccccatacctgtcttgagaaatgtcagcctccagacctgaaagcttcttgtgatttggtttatttctgtagagtttattattatacacagtgttcttgaagtaatagagaagtgcattagaagctcctgcaaatggaaatgaaatgtaaatttagattgtaaatacatgactgcggtaaatagatagcaagaaaaaggatgaagagattagaaatttgccacatttctctaaccctaaagggatgtttctataaatagtttaaaactgtagaagacgaagggggaggaggaaggagaacagaggcaaacagattttctcctaatcctttccatttggcaaaattagaaatggtttttcaattaaatttccctgagcagaggaagaaaccatgtctgtttccacactaaaattcctgtgggtgggagtctctagagttgatttggaggatggatccctgttagtgacaagtgctggtaatgctcctgttggggaaaggggatgagtacaaaaataaatccaagtaagtgtggagggacaagaagatctcacagtgcaggatttcccctggattttctgcattgccttttcacctttcctgtcttagcacgacaaattaggtcccagatgagcaggccctcgcattcaaaccggaaattttaaggaggaagccagattaactttactcgggagacctagtagactctgactttaaagattcttttaatccagctgtttttagggagagctctgtaaaagatgaaagaaatgttttaaaaaaaaattaaaattctgtggggtgaaaacaaagatgttaaatatttgattggcaaggcaactggaaaatctggaccatgtctacaactgctaaaggaggctttgtgaaagagaaaatgagcagcccaaggagatcctgtcctaaacttctctggccagtgaaattcgggccattctctgccacagccctggactgctaggagggcagatcatatgtcttcctcagtggggagaggtgggccctcgctggcagtttctgtaaagcctcgtgctgtggtgtaattcagggagcccagaagctggtatttggccaaggaaccaggctgactatcaacccaagtaagtatgacagggtgaagctacatgcagctgagtacagtcttttcctttctagaccgtgtcctgcaagctctccttgagggacgtatactcattttgcattgtcctttgtagagaagcagaccaggaaagacaggaaagccctcaaatttccacttttaaacacctccctgtaaaaactgtctcgcttccctccccttctacaatcagtttctagtaaatcagaatccggtgaattgatatgcaatttcaacgaaaaaaaaagcagagaaatagttaccccaacaagtgcaaaaagtagaaactatctgagtaccagccaagggaagataattaggaaagaaaaaaaaagaaagaaatggattactggaaccatgatggcagcttagtcacaaagaaaatgataaaaaaaaattaaaattaaatttcaaaaactttaaagatatatacatatatatatatctatatatatatgatatattgtcctctggaactccagcactcacctacagcagctgcattctggacttattatcaaataacctataaacctgtagcttaatgaagagttgagcaatcgtgactatattgacccccaggacccttctgcaaagagcagcttctgttcctgtttctgtaaagccttctgtggctgtgagaatagtggaggtagcaactataaactgacatttggaaaaggaactctcttaaccgtgaatccaagtaagtttgaagggagtgggggaaggggggattcaaacacttctgatttaattacttgcccctccaaaacattccagcttaggttccaaatctaatgtttgtgctggggggatatggtgcccatcagagggattagaactccactgtacaaagactaaattactttcagcccaaaacattcctatcattcatcttaaacaagattattggtgcaaggagaaaaactgaatacagaatcctgagggatccagctaagggtcaggaaatgtttgccgaaaagataaagaggaaattggcatatcgtgactacgcaaatgcagtagaccaaatataaattgtcctgacttagatactaacactcctcttaaatttatcgcctgaaataatggaaccctgcaacttcattaactaatgctgaaaattctataagcaggctccttttcttcttttaccttcactttacctctctgaaaagaactgttctcaatccccagtctggtaactgaggtccagtcagttaactgtctggttaactcaggcagagcatttaaccccactttttccttggttaccaaaatagtggattcagcctccactttacttagttcacctgagaaggggaaaattcatctgtcctctgagtcgtgagaatagagcagtacattctctccttcaaatatacacccacccttccctaatggtaatgtgtgagtacttagaaaagtttttaaatgttagatataaaagtaaggcacagtggttgctaatggcacttcttgaaaatctgcgctgctggtggacttctgaaagtggtgcttataaactaaggctggagaagactgacttgtaaaattcagataaaatgaaaatgggaaaaacttatcaaagggccccggtctcctaagtgccctgatgttgagtaaaggccaaatgccccagttttacttactcagatctgctttctgtgattaagaagagatgcacactagagagaggcactttgaaaaacacagcccaggcaaaattcttaaaaagactggctctggtggcggggcgggtggtgaaggactcagggacaccgtgcatgcagcattgagggagttaatgcagacttgctagcagacagcttggaacgttctgggataggccctgcctgaagaacatgcagtgtggttagccatcaagttcccatgtgcagaagtgccttgctcagcaggggcaaaatcagcacgtctgtggcaacagcaacaatgaataatatatgatgttaaatcccaggggttccgcagtctccactgaggtcttatcaaattaaagcttcaaggggattcatatgaacatcccaggagactcaaggactcagtcgcttttcagagggtgggcagccaatgctagggaccagacagtaggcttttttctttggtttcttaccggaagcacactagggcggggctctgcagtgggttttccagaatgcagagaagctgggagcccctctcagcacttggtcagcctcttaggggactgagaactgtaacaactcctaccctttaaaacattgacgaggtcagggtgtttgacagcctaaccaggcaaagaaaatatctgtgcaaggctagcattcttccagagctctggacagtaatcgtatgccagattttccatgcagtggactctagctgcaggaactatatggcaaggctggagtccaaggaacccatgattaaattctgttttcctgcagtaagtggaacacagagattattgccacagcaacactttgggtgcctgtctgtttgagggcctcagctgagggcaggcatctggttttgcttatgtcctgcggaggctgaagagagggtgggaagccctttagacagtgaatactgtgaaatagtgaagagatgggaagggtcgtttgaatccctgactgctgtccttaaaaaaaatggatacgtcttcttagctaaataatagcctttttctctcacccttttcatgatagtaagcaagctaaaactttaaccctttgtaacaagtggttgcttgaagacatgactaaacaggctagcataaattcagcccaaaaaaagtctgagttaagaaaactaaattctattaaagaggtgtctgtttttcacacccctggggacagggtttgatcatcaccacatcatgaaactgcctggattttgctcttcacattttttgtgacatccagacacagccagggtgactcccaggattcctgtggttgtgtctgttggcaacagaagcattatttggtcaagggatgaaatttacaggaaccccaagtaaatgtgcaaaagcctgcccctaatagagacctcacttaaccctaccactgtggtcaccgggctgctctgtgaggtcagaacacctcaggtgagactgtggagtaaccagatgccctggttttcctgggtttcaggggttttccaggacaaaggtcattctttgctaagcccagaatgatccccaggatagttaatcaccgtaagaaggcacagataaaaacttttttctgtgagctactacttacatttcaccaaattcaagactgacaaaaaaactacgttgtgtgaaagctcagttacatgtgcccatcatttttatttcttatgctagggcatgaagggaagctcaggagatcctgtttcatgaggctacagtctaaatctcatctaattctagtcagtctccaaaaagctgaacactctcctcttgtctccttgtaatcaattcattgtcatcagaaatgtgtgacacctcgaggggaggggaggacgtgtcttgaaaactgatcagagaaattgtcctgaaaatgatgctgtaaaatggaaatgagacctttagaaagagagatgctgaacatgagaaatcagtaagcctcaagacaaaaaccagaggaaatggagagagatgggaggcaggaagccggacctcgggggacgcagcaggtcagtgtcccaggaccagaggtggaaatggtcttccagcctttggtgggatgaaactgagcctcacagacccaggcccctttgggtgagtttattctccccagaattaaaagaggaggaagtctgcgagcttcagaagtccccctagggttcttgtaaaggcctccagtgcagtgctaatgctggtggtactagctatggaaagctgacatttggacaagggaccatcttgactgtccatccaagtaagtgtaacaagacacagcagtatactggaaattctggaatgtcaccccagtgtcaggttttaaagaaccagatattgcttaaagttaagtggtgtcctctgaggtcctttctcttctttaacctcaatattcacagattttcttttggaccctgagttgttaggtctgtctccctgctgcgtgtacagctgaccttgaccctggaaagtcagaatctttcctgctttcagtgtcttctctggaggtgatgccctaacttttttgagggggaggtcatcctttccaaatgactcccctgagtaacctgttctaatgtttagtagcattccctgtcagaagtccttccttacctcaatcttaaattattcttggtatagccgaggccgtttccaccagcatcatccacaataaagaggaaaattgagagcggagtttgaataggtatgtggtatttggttcagaatgggttttaaatgaaagtggagagggaaaaaatgaaacctgaatgggaatctgaggtcttatttcaaatccctctctgtttcctgtctgtcatctccttttgcttctatagatgcaaaactacagagagagaggcggggagagaaaggatagacagaaataaacatccactgtgtccattccctgtcactgaaaccaccaggcaagggattacaattaattccaaagagtttcagatacacggcttaatacctttctccttgtggtgacttgtatcctggctgataattagagcagatagaaagatttggctttggtgtgtttgccgctgcaccccgctgggaagagacagaaacttgactgttttttaagattcataaagttccttctgtcagtcgtcgtaaaactccctgaagcagggagatgcgtgacagctatgagaagctgatatttggaaaggagacatgactaactgtgaagccaagcaagctggaaagacctaaactcacagtgttccttatgtacttttgctcccttccccgtttcaggccttttggctgtttcctgtagggattctaagagagtcaaatggaaatggattgaagagagtctgaagccccgtgggtgctcagaaatgataaatgaaaggaataagagacagaaagggaaacaaagttgaaaagcaggaatatgtctttcactgcagcttgataagactgagatgtgaggtgggtgtcagagaagggcatgatcgctccagctgctattgcagaacactctgttttcctaggatctctatcaagggcagtgtcctcttatgccaaagggatgagtcaagtccctatatttctggagtagctgcccttgtgcaggcatagttggtcaggcagacagcacaatcccagctcagtgtgtatggaggaggccacctgacattgccagctgtatctgctccattcagtggcagcataaatccataccaggtgggtgtggatttggaatatgccagtgccactacaaggctgaatgttgagttgttgtgatcatcttgaatgtgtgagatgcctccaagtgaagtctggttctaatgagcagggtgcaggttggaccaatattgcccattttctgttgagtttctccaagcccagtagtgtgggagccaacattgagagactgacatttgagctagggatcctattgactgaaatatgccaaagggatctgaaaggtcaaaactgccttcagagctcagcctttgttgttatctctctggcagttgtcatttcagcaaaatgcatccacttagaaagctcagctcttcattaggcagacaaatgagaacaacatattgaccagagataaggagttgggagcccagatctcagcctctgagagcctggcatttccagttctttaatcacgtgagccagtgagcatatgctatctcagagaaagcagatcaatggtgcctgaggacctggtgtcaccaagctagggcttagagacagaaatgagatgcagatggggatgttgtgtgaattggggaataatagagaagtgaggaggagacagggagttcaatgatgctttttaaaaccagcagcatgtgagaaattgtaatgacacaaaggtgaagaagtatgtattgcatataatcctagcaagtttcctaccattcccaacagaatctagcctcactgtggctccaactcacagatcctataggtaatgctgaatcgtacctgagatgccttttgaagtggcatcaagactgggctctaaaatctttaagagtcacctgtcagttattgtaaaggtttggatggctgtgtgaaaacctcctacgacaaggtgatatttgggccagggacaagcttatcagtcattccaagtaagtgtccctggggtgctgcctgtggagtgcgctggggctaacagtctcatacattagggcttaaatgactgtgcagatggcatcgtggttgaggacacaaaactgagagaatcgagatacattgactctgatcagaaaaaaaggtcacggaatagcaaacataggtttagtccttaaaaggtagcatagataacatgggacttgaacgtggcaatttgaaaaacaacctgtggtctatcagcacgttctcactgcacacgggggataaacaggggtgggggaataagcaatggacattgcatgataggggtgctagggaaatgaggcaggtcaggaagaaggaaggtgatcagagcctcatacggagttaatctagagaagatgaattgttccataagtttcacaaagaaataaagtccaaagatataataagaagtcctgattaaaatccacttcagaatcatatgatcatcaggagagaaattaagtcttaaaagaaaaagaagtttttaaatgtaggtccataaaacaaatggacctacacctttaattagacagcaagcagcacaagatgcacgttagccttccttttaatcccctctcaggaggaatcagtctctccagctgcacatggtcacagctgctctaagccctggagctccttcccagtaatacccttgctcctgtgcctgcacagggaaaggagatgcctgcctgcctgcctgcctgcctgcctaccggtctgccttttggtccgccgcttggtggggccccaggtgtaacctctggctgtctcttctgcctggtttttgttgagcttcctatcacagtggaacaccggtaaccagttctattttgggacagggacaagtttgacggtcattccaagtaagtcaaagaaaattttccatcaccattgtgttgagcaaaccctttaaactgcagaaagagctgtcaaagtctgctactctatttctctgcttctaggtataactttatctggaccagagtaaagaggcccccgacccaccccgagaatgatttatgcttggacaggtctttatttcattccttgaactatctatctgtctatctatctatccagctatctatgtatctatctatctatcatctatctcagaaatagttgtttttaacagttgattctgtgcctcacccaaattgtcattaactaaatgcagatgtgctgccacactgataaacttcattggaaaaaaagaaaaaaccaaacccagagaatgttccttgaacattcctgaagtgggggggcaggcgatgtcacttgcagtgacagctggcctctctagctcacccccacatctgtgccaaccagagaagctgggccctttgtagcacaagcctcaggagcagagaatggagggacattctcaactgagaggagagggactaggaggctagatgggaaatgaggtgactctacagaaaatcgaatatgggatggtataaaaggatgagaaagatggcagggggtccacgatcgctcttgtatttagacctgggggatgcactgatagataccacctggagagagaaagaggatttctgtttccctctgaagaaaaatgtggcagaaaaatcaaaacagatcgcacatgtcaagcctctcctaattacagcctttcattctggtttctctcagctgttccagcaggaaatggtaggaaagggtcattggtgcctttgatgttgtggaagcattgcaggaaggagatttgcaagaaacggggcaggggcttgcagtagagtctggagagtttagaatgatggtttttgcaatgacttagaacactgtgtatctaactttggaaatgagaaattaacctttgggactggaacaagactcaccatcatacccagtaagttcttcatccttggtcaggaaatcagcctgcataagattctggggatcatagtagacatgcaggcttagagaattttcatctgtccttgttcataactggtagagacaggtggcagccaaatatctgagttttccgggggaactccagtcctgactatttaattcaaaactagaaaatatgattcacaattctgtttttgctgctgccgtcaagtgctaatgtggcatgtgaagagaattcaggcagaatgactgcatcttcactttcatcttgtgtgataattttagctttgagtactgcaagtgtttgggagaaatggtagaaacatagaatatcaaagagacaagcaaaccaagagacccagagaggcaggcagacggaacgtcaggcagtataattttacaaaactaattcagtgttgtgtctctctctgcaaatggcaaggtatcgggaaaggtgctaagagctagtgctccgggtggggcaggattatctaaatagaaaactaagcactgatctcagggggaaagtttaaacttggaaatctctgggtttggttttttgtttttttccaatgaagtttatcagtgtggcagcacatctgcatttaattaatgacaatttgggtgaggcacagaattaactgttaaaaacaactatttctatgcagccataaaaaatgatgagttcatgtcctttgtagggacatggatgaaactagaaatcatcattctcagtaaactatcgcaagaacaaaaaaccaaacaccgcatattctcactcataggtgggaattgaacaatgagatcacatggacacaggaaggggaacatcacactctggggactgttgcggggtggggggagtggggagggatagcattgggagatatacctaatgctaaatgacgagttagtgggtgcagcacaccagcatggcacatgtatacatatgtaactaacctgcacaatgtgcataagtaccctaaaacttaaagtataataataaaaaaaaacaactatttctgagatagataaatgatagagagagggagatactggatatatatacacagttaatgacaatttgggtgaggcacggaattaactgttaaaaacaacatttctgagatagagagaaagagagagatactggatatatatacacagggtagaagaatgtagagagaaacatgggcaaatatattcttttgcacctacaattaaaagctgtggaaaatttgaatatgttcactttgtaaccaaagacaaccacacaaaatggaacggaaagcatgcttgcaacagcgagaactggaagtatggaacctttctgtcttaaccactcagttgcctagaagaatcttttttctattttgctgcattagaaattaaaggcatgagtattgaggatttgggtaggtcagacttttatagtgacaatcacattacaaagcacctcttagctaggttggataaagcacctttaaacatcaaagtctttttcttctttctggatgagatagaaaaatggtctctcctcactctgtatctaaggacagggggctcagagagttccagacttacaaagtgagactgcagcagagctgagccatgggacctggagggacccagtgacggttagtctgctccctcccacgggtgctatagtagccacaaccgttcaggaaaccgtccccaggtgagaacgtaacacacgcagggaaaatcccactgctactaagagcaactcagcataagaatgcattacccagcaagggacagtcagaggggctctaaaccagagccccaaatatttgaaaactttatgtggaagccagctataacaagttcgttttccaagccgtgcttccagaagctgttagtggttggtagttgctaagggttttgaaactggaggacatcatagcagagtggaattatttggcacaaggggctatgattagaattaatgagatgaaagaaaattctggctagaagactagaaaaatccggaaagaaaagatacagtaaaccttgggggagttgtagcatttatcctagtccaagcagcaaagagcagacagaagccaaattccaataaacaattggcctttttacttttacaagtttctgcaattatcacaatgtcttcagcttcttgggcaaatatcaacaggtcctaaatgcaaagtggaacagtcctctgtttccagaaccgagtagcttagccccgccccacacaccacccatgctcaaccactgtttttgtagaggagtttgacgctgtgtggaatatggaaacaaactggtctttggcgcaggaaccattctgagagtcaagtcctgtgagtataaaacacactcaagtcccaacctgggtttcattgcatattaaataaactttttctggctgggaagtatttgattctaaagaaaggaaaagtgaaattccaagcgcaacgcaagcatttcattagtgtgattcattaagaatttccatgggttgccttcgagagcgttaatcacatccattcactggtgagacccacagtttgaaaattgagttaaatttgaaaaaaaattgtcaccatctctgtagaccacagtgcttgctgtttgggtgtctagacttccaaaatggaacctcaatctgtagtttcgagcttggagatttatcccgagcccgtgacttagagatgtgtaagaaaagctgcacactgctgggccttgtagggcatttgtgggatcagtgtcatgaaatagcctgggtagacaggttggtgaggagacactggtgacaggtgtctgccctgtttctgtaaagctgctgacagccgtgagaagaaaagcagcggagacaagctgacttttgggaccgggactcgtttagcagttaggcccagtaagtctgagcagaaagtaagatatttatgccttttcctattatttgttctagcctgacatttgagttgtcctcctttggattccagatcaacaaaccatagtgtcttttcatactccttttaatatttgtggctaagggccctccgttcttcccatctgtcctacatgagggtcctgtggccaggtccacattcataaagaagccaacagtgatgcagttggttggcagtgtgtcaagaaactgcagtcatcatctccagggcccttactctggttatgtgtgtttcaagcttttatgccagcaacagaggagagggagaagtgaccagtagcaatgaccagggctattagctgtacctggtgtctgtgggtttcagagcagctgtggaggttacgggaggttcagggcatgagtttttctggcagaggagtttatgtaaagggttggcccagagtgt
